(19) United States
(12) Patent Application Publication
(10) Pub. No.: US 2011/0092445 A1
(43) Pub. Date: Apr. 21, 2011

(54) Amyloid ß peptide analogues, oligomers thereof, processes for preparing and composi-tions comprising said analogues or oligomers, and their uses

(75) Inventors: Stefan Barghorn, Mannheim (DE); Heinz Hillen, Hassloch (DE); Rohinton Edalji, Wadsworth, IL (US); Leo Barrett, Lake Villa, IL (US); Paul Richardson, Libertyville, IL (US); Liping Yu, Iowa City, IA (US); Edward Olejniczak, Grayslake, IL (US); John E. Harlan, Lake Zurich, IL (US); Thomas Holzman, Libertyville, IL (US)

(73) Assignee: Abbott Laboratories, Abbott Park, IL (US)

(21) Appl. No.: 12/509,325

(22) Filed: Jul. 24, 2009

Related U.S. Application Data
(60) Provisional application No. 61/083,589, filed on Jul. 25, 2008.

(51) Int. Cl. A61K 38/12; C07K 4/00; C07K 14/00; G01N 33/68

(52) U.S. Cl. 514/21.1; 530/317; 436/501

(57) ABSTRACT

The present invention relates to an amyloid β peptide analogues comprising an amino acid sequence or a peptidomimetic thereof, wherein the sequence (i) forms a loop, (ii) has at least 66% identity to the amino acid sequence of native Aβ peptide or a portion thereof, (iii) comprises at least 6 contiguous amino acid residues and (iv) has at least 2 non-contiguous amino acid residues which are covalently linked with each other, oligomers comprising a plurality of said amyloid β peptide analogues, processes for preparing the amyloid β peptide analogues or oligomers, compositions comprising the amyloid β peptide analogues or oligomers, and uses of the amyloid β peptide analogues or oligomers such as their use for treating or preventing an amyloidosis (e.g. by active immunization), for diagnosing an amyloidosis, and for providing agents that are capable of binding to the amyloid β peptide analogues or oligomers. The subject invention also describes agents that are capable of binding to the amyloid β peptide analogues or oligomers, e.g. antibodies, compositions comprising the agents, and uses of the agents such as their use for treating or preventing an amyloidosis (e.g. by passive immunization) and for diagnosing an amyloidosis.

[0001] This application claims priority to the provisional application Ser. No. 61/083,589 filed Jul. 25, 2008, which is incorporated herein by reference.

### FIELD OF THE INVENTION

[0002] The subject invention relates to amyloid β peptide analogues, oligomers comprising a plurality of said amyloid β peptide analogues, processes for preparing the amyloid β peptide analogues or oligomers, compositions comprising the amyloid β peptide analogues or oligomers, and uses of the amyloid β peptide analogues or oligomers such as their use for treating or preventing an amyloidosis (e.g. by active immunization), for diagnosing an amyloidosis, and for providing agents that are capable of binding to the amyloid β peptide analogues or oligomers. The subject invention also describes agents that are capable of binding to the amyloid β peptide analogues or oligomers, e.g. antibodies, compositions comprising the agents, and uses of the agents such as their use for treating or preventing an amyloidosis (e.g. by passive immunization) and for diagnosing an amyloidosis.

### BACKGROUND OF THE INVENTION

[0003] In 1907, the physician Alois Alzheimer first described the neuropathological features of a form of dementia subsequently named in his honor as Alzheimer's disease (AD). In particular, AD is the most frequent cause for dementia among the aged, with an incidence of about 10% of the population in those above 65 years of age. With increasing age, the probability of disease also rises. Globally, there are about 15 million people affected with the disease and further increases in life expectancy are expected to increase the number of people affected with the disease to about three-fold over the next decades.

[0004] From a molecular point of view, Alzheimer's disease (AD) is characterized by a deposit of abnormally aggregated proteins. In the case of extracellular amyloid plaques, these deposits consist mostly of amyloid-β-peptide filaments, and in the case of the intracellular neurofibrillary tangles (NFTs), mostly of the tau protein. The amyloid β (Aβ) peptide arises from the β-amyloid precursor protein by proteolytic cleavage. This cleavage is effected by the cooperative activity of several proteases named α-, β- and γ-secretase. Cleavage leads to a number of specific fragments of differing length. The amyloid plaques consist mostly of peptides with a length of 40 or 42 amino acids (Aβ40, Aβ42). The dominant cleavage product is Aβ40; however, Aβ42 has a much stronger toxic effect. Cerebral amyloid deposits and cognitive impairments very similar to those observed in Alzheimer's disease are also hallmarks of Down's syndrome (trisomy 21), which occurs at a frequency of about 1 in 800 births.

[0005] The amyloid cascade hypothesis of Hardy and Higgins postulated that increased production of Aβ(1-42) would lead to the formation of protofibrils and fibrils (i.e., the principal components of Aβ plaques), these fibrils being responsible for the symptoms of Alzheimer's disease. Despite the poor correlation between severity of dementia and Aβ plaque burden deposited, this hypothesis was favored until recently.

[0006] U.S. Pat. No. 7,342,091 describes soluble cyclic analogues of amyloid β peptide having an intra-peptide bridge in the region between residues Gln15 and Val24 (686 and 695 in APP), with the two amino acids that participate in the bridge formation being arranged at relative separations of i+3, i+4, i+5, i+6 or i+7. Specifically, the side chains of Asp17 and Lys21 of the Aβ peptide (residues 688 and 692 in APP numbering) are connected via a covalent bridge. The soluble cyclic analogues of amyloid β peptide described in U.S. Pat. No. 7,342,091 are designed to inhibit amyloidogenesis or amyloid formation by endogenous Aβ peptide. That is, the soluble cyclic analogues are supposed to physically interact with the Aβ peptide and block amyloid from forming.

[0007] The discovery of soluble Aβ forms in AD brains, which correlates better with AD symptoms than plaque load does, has, however, led to a revised amyloid-cascade-hypothesis.

[0008] Under most conditions, amyloid β peptides rapidly convert into fibril forms. However, addition of detergent or fatty acid can result in long lived soluble forms (WO 2004/067561; WO 2006/094724; S. Barghorn et al., J. Neurochem. 95, 834 (2005)) that are potent antigens in mice and rabbits for eliciting specific antibodies. They have been shown to bind to dendritic processes of neurons in hippocamal cell cultures and completely block long-term potentiation in rat hippocampal slices. These data suggest that amyloid β-peptides with structural features similar to the soluble forms prepared in vitro are also present in vivo.

[0009] More specifically, WO 2004/067561 relates to globular oligomers (“globulomers”) of Aβ(1-42) peptide and a process for preparing them. The data suggest the existence of an amyloid fibril independent pathway of Aβ folding and assembly into Aβ oligomers which display one or more unique epitopes (hereinafter referred to as the globulomer epitopes). Since globulomer epitopes were detected in the brain of AD patients and APP transgenic mice and the globulomers specifically bind to neurons and blocks LTP, the globulomers represent a pathologically relevant Aβ conformer. WO 2004/067561 further describes that limited proteolysis of the globulomers yields truncated versions of said globulomers such as Aβ(20-42) or Aβ(12-42) globulomers. These Aβ(20-42) and Aβ(12-42) globulomers have been used to generate globulomer-specific antibodies. For instance, WO 2007/062852 describes several monoclonal antibodies which specifically recognize Aβ(20-42) globulomer.

[0010] WO 2006/094724 relates to non-diffusible globular Aβ(X-38 . . . 43) oligomers wherein X is selected from the group consisting of numbers 1 . . . 24. These globulomers are said to be obtainable by same processes as described in WO 2004/067561, i.e. SDS- or fatty acid-induced oligomerization of Aβ(1-38 . . . 43) peptide to generate Aβ(1-38 . . . 43) globulomers, and limited proteolysis of Aβ(1-38 . . . 43) globulomers to generate truncated versions thereof, i.e., Aβ(X-38 . . . 43) globulomers wherein X is selected from the group consisting of numbers 2 . . . 24.

[0011] Both, WO 2004/067561 and WO 2006/094724 also describe cross-linked globulomers obtained by reacting a globulomer with cross-linking agents such as glutardialdehyde. Cross-linking was observed to occur only between amino groups of the N-termini and Lys-16, while sparing Lys-28 which must therefore be hidden in the interior of the Aβ(1-42) globulomer. The resultant cross-link is primarily inter-molecular rather than intra-molecular.

[0012] WO 2007/064917 describes the cloning, expression and isolation of recombinant forms of amyloid β peptide. The peptide expressed in E. coli completely retains its N-terminal methionine residue and represents the native sequence of amyloid beta from positions 0 to position 42 (referred to hereafter as N-Met Aβ(1-42)).

[0013] Similar to Aβ-(1-42) peptide, adding either fatty acid or hydrocarbon detergent to preparations of N-Met Aβ-(1-42) peptides leads to the formation of stable soluble aggregates whose oligomeric state was observed to depend on the amount of residual detergent (SDS) or lipid-like additive. In the presence of 0.2% SDS, the amyloid β peptide forms a small soluble aggregate (referred to hereafter as N-Met Aβ(1-42) pre-globulomer) which can then be converted into a higher MW soluble aggregate (referred to hereafter as N-Met Aβ(1-42) globulomer) when the SDS concentration is diluted to 0.05%. Based on sedimentation studies, the N-Met Aβ(1-42) pre-globulomer has a MW of 16 kDa (corresponding to ˜4 peptides/soluble aggregate) while the N-Met Aβ(1-42) globulomer has a MW of ˜64 kDa (corresponding to ˜14-16 peptides/soluble aggregate).

[0014] Biophysical and structural characterization of N-Met Aβ(1-42) pre-globulomer revealed that it contains mixed intermolecular parallel/intramolecular anti-parallel β-sheets that are distinct from the all-parallel amyloid β-peptides found in structural studies of fibrils.

[0015] Said methods of globulomer formation represent a huge step in the ability to form homogeneous Aβ oligomer preparations in high yields. However, even this methodology can result in preparations showing some degree of heterogeneity, as sodium dodecyl sulfate (SDS) is removed, and over time. In addition, the truncations that have been made in order to best display the globulomer epitopes often further increase the heterogeneity and decrease the stability of the Aβ globulomers. These problems only increase as SDS is removed from the system. In addition, N-terminally truncated Aβ globulomers display very low solubility in the absence of detergents.

[0016] It was therefore an object of the present invention to provide amyloid β peptide analogues which display the relevant conformation or epitope, be it as a monomer or an oligomer. Preferably, such an amyloid β peptide analogue or oligomer thereof shows better physico/chemical properties than the known globulomers, e.g. a smaller size, enhanced homogeneity, enhanced stability, increased lifetime, and/or greater resistance to proteases in vivo. A better reproducibility would be a further advantage.

### SUMMARY OF THE INVENTION

[0017] The present invention provides a stabilized conformation of the Aβ peptide, or portions thereof, that displays an epitope important for: 1) the toxic response involved in progression of Alzheimer's disease (the “toxic principle” embodied in the Aβ misfolded peptide), 2) the generation of therapeutically relevant antibodies which are specific for this conformation and do not cross-react with endogenous physiological monomeric Aβ peptide as it is detectable in CSF and plasma, and/or 3) the engendering of an immune response by active immunization eliciting an antibody response which is polyclonal but mono-specific for this toxic conformation and does not cross-react with endogenous physiological monomer Aβ peptide as it is detectable in CSF and plasma. This stabilization is achieved by an intra-molecular covalent bond that locks the peptide or a peptidomimetic thereof into a conformation that both is more stable and displays the needed epitope. The desired potency of these stabilized peptides or peptidomimetics can easily be measured by cross-reaction with available globulomer selective antibodies as described in WO 2007/064972 and WO 2007/062852 in standard immunoassays (e.g., immunoprecipitation, ELISA, dot blot), or in standard cellular assays used to assess toxicity of Aβ peptides.

[0018] According to a first aspect, the present invention relates to amyloid β peptide analogues comprising an amino acid sequence, wherein the sequence (i) forms a loop, (ii) has at least 66% identity to the amino acid sequence of native Aβ peptide or a portion thereof, (iii) comprises at least 6 contiguous amino acid residues and (iv) has at least 2 non-contiguous amino acid residues which are covalently linked with each other.

[0019] According to a second aspect, the present invention also relates to amyloid β peptide analogues which comprise a peptidomimetic of said amino acid sequence as defined herein.

[0020] Particular embodiments of the amyloid β peptide analogues include the following:

the amyloid β peptide analogues, wherein the loop is a β-hairpin loop;
the amyloid β peptide analogues of any one of the preceding embodiments, wherein native Aβ human peptide or the portion thereof is Aβ(X . . . Y), X being selected from the group consisting of the numbers 1 . . . 23 and Y being selected from the group consisting of the numbers 28 . . . 43;
the amyloid β peptide analogues of the preceding embodiment, wherein X is selected from the group consisting of the numbers 15 . . . 23;
the amyloid β peptide analogues of the preceding embodiment, wherein X is selected from the group consisting of the numbers 18 . . . 22;
the amyloid β peptide analogues of the preceding embodiment, wherein Y is selected from the group consisting of the numbers 28 . . . 43;
the amyloid β peptide analogues of any one of the preceding embodiments, wherein native Aβ peptide or the portion thereof has a sequence selected from the group consisting of SEQ ID NO:1-368;
the amyloid β peptide analogues of any one of the preceding embodiments, wherein the 6 contiguous amino acid residues comprise the sequence VGSN or DVGSNK;
the amyloid β peptide analogues of any one of the preceding embodiments, wherein the 6 contiguous amino acid residues comprise the sequence AED;
the amyloid β peptide analogues of any one of the preceding embodiments, wherein the amino acid sequence of the amyloid β peptide analogue comprises the sequence X₁₉X₂₀X₂₁X₂₂X₂₃-VGSN-X₂₈X₂₉X₃₀X₃₁X₃₂, with each of X₁₉, X₂₀, X₂₁, X₂₂, X₂₃, X₂₈, X₂₉, X₃₀, X₃₁, X₃₂ independently representing an amino acid which may be covalently linked with another amino acid;
the amyloid β peptide analogues of the preceding embodiment, wherein the amino acid sequences X₁₉X₂₀X₂₁ and X₃₀X₃₁X₃₂ are in anti-parallel orientation;
the amyloid β peptide analogues of the preceding embodiments, wherein X₁₉ is an amino acid residue selected from the group consisting of phenylalanine, tyrosine, valine, leucine, isoleucine, and methionine;
the amyloid β peptide analogues of any one of the preceding embodiments, wherein X₂₀ is an amino acid residue selected from the group consisting of phenylalanine, tyrosine, valine, leucine, isoleucine, and methionine;
the amyloid β peptide analogues of any one of the preceding embodiments, wherein X₂₁ is an amino acid residue selected from the group consisting of alanine, valine, glycine, and serine;
the amyloid β peptide analogues of any one of the preceding embodiments, wherein X₂₂ is an amino acid residue selected from the group consisting of glutamic acid and aspartic acid;
the amyloid β peptide analogues of any one of the preceding embodiments, wherein X₂₃ is an amino acid residue selected from the group consisting of glutamic acid and aspartic acid;
the amyloid β peptide analogues of any one of the preceding embodiments, wherein X₂₈ is an amino acid residue selected from the group consisting of lysine and arginine;
the amyloid β peptide analogues of any one of the preceding embodiments, wherein X₂₉ is an amino acid residue selected from the group consisting of glycine, alanine, and serine;
the amyloid β peptide analogues of any one of the preceding embodiments, wherein X₃₀ is an amino acid residue selected from the group consisting of alanine, valine, glycine, and serine;
the amyloid β peptide analogues of any one of the preceding embodiments, wherein X₃₁ is an amino acid residue selected from the group consisting of isoleucine, leucine, valine, phenylalanine, and methionine;
the amyloid β peptide analogues of any one of the preceding embodiments, wherein X₃₂ is an amino acid residue selected from the group consisting of isoleucine, leucine, valine, phenylalanine, and methionine;
the amyloid β peptide analogues of any one of the preceding embodiments, wherein the amino acid sequence of the amyloid β peptide analogue comprises the sequence F₁₉X₂₀A₂₁-Q-A₃₀I₃₁I₃₂, with X₂₀ representing an amino acid and Q being an amino acid sequence comprising the sequence VGSN;
the amyloid β peptide analogues of the preceding embodiment, wherein at least part of the amino acid sequence Q forms the loop;
the amyloid β peptide analogues of the preceding embodiments, wherein the amino acid sequence Q consists of 5, 6, 7, or 8 amino acid residues;
the amyloid β peptide analogues of any one of the preceding embodiments, wherein the amino acid sequence of the amyloid β peptide analogues comprises the sequence F₁₉X₂₀A₂₁X₂₂D₂₃V₂₄G₂₅S₂₆N₂₇K₂₈X₂₉A₃₀I₃₁I₃₂ and each of X₂₀, X₂₂, X₂₉, independently represents an amino acid residue;
the amyloid β peptide analogues of the preceding embodiment, wherein the amino acid sequences F₁₀X₂₀A₂₁ and A₃₀I₃₁I₃₂ are in anti-parallel orientation;
the amyloid β peptide analogues of any one of the preceding embodiments, wherein the interproton distance for at least one atom pair selected from the group consisting of F₁₉(NH)—I₃₂(NH), F₁₉(NH)—I₃₂(HB), F₁₉(NH)—I₃₂(CG2), A₂₁(NH)-A₃₀(NH), A₂₁(NH)-A₃₀(CB), A₂₁(NH)—I₃₁(CD1), A₂₁(NH)—I₃₁(CG2), I₃₂(NH)—F₁₉(CD1), I₃₂(NH)—F₁₉(CD2), I₃₂(HN)—F₁₉(CB), and A₃₀(NH)-A₂₁(CB) is 1.8 to 6.5 Angstroms;
the amyloid β peptide analogues of any one of the preceding embodiments, wherein the atom pairs F₁₉(CO)—I₃₂(N), I₃₂(CO)—F₁₉(N), A₂₁(CO)-A₃₀(N), and A₃₀(CO)-A₂₁(N) are at a distance of 3.3±0.5 Å, wherein CO indicates the backbone oxygen atom, and the phi (φ) angles of the residues range from −180 to −30 and psi (ψ) angles of the residues range from approximately 60 to 180 or from approximately −180 to −150;
the amyloid β peptide analogues of any one of the preceding embodiments, wherein the amino acid sequence of the amyloid β peptide analogue comprises a sequence selected from the group consisting of SEQ ID NO:1-368, at least two amino acid residues of said sequence being modified so as to form an intra-sequence covalent linkage;
the amyloid β peptide analogues of any one of the preceding embodiments, wherein the amino acid sequence of the amyloid β peptide analogue is a sequence selected from the group consisting of SEQ ID NO:369-698, wherein
X₁₂ is valine, leucine, isoleucine, alanine, methionine, or an amino acid residue which is covalently linked to another amino acid residue of the sequence;
X₁₃ is histidine, tyrosine, serine, methionine, or an amino acid residue which is covalently linked to another amino acid residue of the sequence;
X₁₄ is histidine, tyrosine, serine, methionine, or an amino acid residue which is covalently linked to another amino acid residue of the sequence;
X₁₅ is glutamine, asparagine, methionine, serine, or an amino acid which is covalently linked to another amino acid residue of the sequence;
X₁₆ is lysine, arginine, or an amino acid residue which is covalently linked to another amino acid residue of the sequence;
X₁₇ is leucine, isoleucine, valine, phenylalanine, methionine, or an amino acid residue which is covalently linked to another amino acid residue of the sequence;
X₁₈ is valine, leucine, isoleucine, alanine, methionine, or an amino acid residue which is covalently linked to another amino acid residue of the sequence;
X₁₉ is phenylalanine, tyrosine, valine, leucine, isoleucine, methionine, or an amino acid residue which is covalently linked to another amino acid residue of the sequence;
X₂₀ is phenylalanine, tyrosine, valine, leucine, isoleucine, methionine, or an amino acid residue which is covalently linked to another amino acid residue of the sequence;
X₂₁ is alanine, valine, glycine, serine, or an amino acid residue which is covalently linked to another amino acid residue of the sequence;
X₂₂ is glutamic acid, aspartic acid, or an amino acid residue which is covalently linked to another amino acid residue of the sequence;
X₂₉ is glycine, alanine, serine, or an amino acid residue which is covalently linked to another amino acid residue of the sequence;
X₃₀ is alanine, valine, glycine, serine, or an amino acid residue which is covalently linked to another amino acid residue of the sequence;
X₃₁ is isoleucine, leucine, valine, phenylalanine, methionine, or an amino acid residue which is covalently linked to another amino acid residue of the sequence;
X₃₂ is isoleucine, leucine, valine, phenylalanine, methionine, or an amino acid residue which is covalently linked to another amino acid residue of the sequence;
X₃₃ is glycine, alanine, serine, or an amino acid residue which is covalently linked to another amino acid residue of the sequence;
X₃₄ is leucine, isoleucine, valine, phenylalanine, methionine, or an amino acid residue which is covalently linked to another amino acid residue of the sequence;
X₃₅ is methionine, valine, leucine, isoleucine, alanine, or an amino acid residue which is covalently linked to another amino acid residue of the sequence;
X₃₆ is valine, leucine, isoleucine, alanine, methionine, or an amino acid residue which is covalently linked to another amino acid residue of the sequence;
X₃₇ is glycine, alanine, serine, or an amino acid residue which is covalently linked to another amino acid residue of the sequence;
X₃₈ is glycine, alanine, serine, or an amino acid residue which is covalently linked to another amino acid residue of the sequence; and
X₃₉ is valine, leucine, isoleucine, alanine, methionine, or an amino acid residue which is covalently linked to another amino acid residue of the sequence,
at least one amino acid residue selected from the group consisting of X₁₂, X₁₃, X₁₄, X₁₅, X₁₆, X₁₇, X₁₈, X₁₉, X₂₀, X₂₁ and X₂₂ and at least one amino acid residue selected from the group consisting of X₂₉, X₃₀, X₃₁, X₃₂, X₃₃, X₃₄, X₃₅, X₃₆, X₃₇, X₃₈, X₃₀ being covalently linked with each other;
the amyloid β peptide analogues of the preceding embodiment, wherein at least one amino acid residue selected from the group consisting of X₁₂, X₁₃, X₁₄ and at least one amino acid residue selected from the group consisting of X₃₇, X₃₈, X₃₉ are covalently linked with each other, the amyloid β peptide analogues of the preceding embodiment, wherein at least one amino acid residue selected from the group consisting of X₁₃, X₁₄, X₁₅ and at least one amino acid residue selected from the group consisting of X₃₆, X₃₇, X₃₈ are covalently linked with each other, the amyloid β peptide analogues of the preceding embodiment, wherein at least one amino acid residue selected from the group consisting of X₁₄, X₁₅, X₁₆ and at least one amino acid residue selected from the group consisting of X₃₅, X₃₆, X₃₇ are covalently linked with each other, the amyloid β peptide analogues of the preceding embodiment, wherein at least one amino acid residue selected from the group consisting of X₁₅, X₁₆, X₁₇ and at least one amino acid residue selected from the group consisting of X₃₄, X₃₅, X₃₆ are covalently linked with each other, the amyloid β peptide analogues of the preceding embodiment, wherein at least one amino acid residue selected from the group consisting of X₁₆, X₁₇, X₁₈ and at least one amino acid residue selected from the group consisting of X₃₃, X₃₄, X₃₅ are covalently linked with each other, the amyloid β peptide analogues of the preceding embodiment, wherein at least one amino acid residue selected from the group consisting of X₁₇, X₁₈, X₁₉ and at least one amino acid residue selected from the group consisting of X₃₂, X₃₃, X₃₄ are covalently linked with each other, the amyloid β peptide analogues of the preceding embodiment, wherein at least one amino acid residue selected from the group consisting of X₁₈, X₁₉, X₂₀ and at least one amino acid residue selected from the group consisting of X₃₁, X₃₂, X₃₃ are covalently linked with each other, the amyloid β peptide analogues of the preceding embodiment, wherein at least one amino acid residue selected from the group consisting of X₁₉, X₂₀, X₂₁ and at least one amino acid residue selected from the group consisting of X₃₀, X₃₁, X₃₂ are covalently linked with each other, the amyloid β peptide analogues of the preceding embodiment, wherein at least one amino acid residue selected from the group consisting of X₂₀, X₂₁ and X₂₂ and at least one amino acid residue selected from the group consisting of X₂₉, X₃₀, X₃₁ are covalently linked with each other, or wherein the amino acid residues X₁₂ and X₃₉, X₁₃ and X₃₈, X₁₄ and X₃₇, X₁₅ and X₃₆, X₁₆ and X₃₅, X₁₇ and X₃₄, X₁₈ and X₃₃, X₁₉ and X₃₂, X₂₀ and X₃₁, X₂₁ and X₃₀, or X₂₂ and X₂₉ are covalently linked with each other;
the amyloid β peptide analogues of any one of the preceding embodiments, wherein the amino acid sequence of the amyloid β peptide analogue comprises the sequence X₂₀A₂₁E₂₂D₂₃-X₂₄X₂₅X₂₆X₂₇X₂₈X₂₉X₃₀X₃₁, with each of X₂₀, X₂₄, X₂₅, X₂₆, X₂₇, X₂₈, X₂₉, X₃₀, X₃₁ independently representing an amino acid which may be covalently linked with another amino acid;
the amyloid β peptide analogues of the preceding embodiment, wherein the amino acid sequences X₂₀X₂₁X₂₂X₂₃ and X₂₈X₂₉X₃₀X₃₁ are in anti-parallel orientation;
the amyloid β peptide analogues of the preceding embodiments, wherein X₂₀ is an amino acid residue selected from the group consisting of phenylalanine, tyrosine, valine, leucine, isoleucine, and methionine;
the amyloid β peptide analogues of any one of the preceding embodiments, wherein X₂₄ is an amino acid residue selected from the group consisting of valine, leucine, isoleucine, alanine, and methionine;
the amyloid β peptide analogues of any one of the preceding embodiments, wherein X₂₅ is an amino acid residue selected from the group consisting of glycine, alanine, and serine;
the amyloid β peptide analogues of any one of the preceding embodiments, wherein X₂₆ is an amino acid residue selected from the group consisting of serine, glycine, alanine, and threonine;
the amyloid β peptide analogues of any one of the preceding embodiments, wherein X₂₇ is an amino acid residue selected from the group consisting of asparagine, glutamine, and methionine;
the amyloid β peptide analogues of any one of the preceding embodiments, wherein X₂₈ is an amino acid residue selected from the group consisting of lysine and arginine;
the amyloid β peptide analogues of any one of the preceding embodiments, wherein X₂₉ is an amino acid residue selected from the group consisting of glycine, alanine, and serine;
the amyloid β peptide analogues of any one of the preceding embodiments, wherein X₃₀ is an amino acid residue selected from the group consisting of alanine, valine, glycine, and serine;
the amyloid β peptide analogues of any one of the preceding embodiments, wherein X₃₁ is an amino acid residue selected from the group consisting of isoleucine, leucine, valine, phenylalanine, and methionine;
the amyloid β peptide analogues of any one of the preceding embodiments, wherein the amino acid sequence of the amyloid β peptide analogue comprises the sequence X₂₀-Q-X₂₄X₂₅X₂₆X₂₇X₂₈X₂₉A₃₀I₃₁, with each of X₂₀, X₂₄ X₂₅, X₂₆, X₂₇, X₂₈, X₂₉ independently representing an amino acid and Q being an amino acid sequence comprising the sequence AED; the amyloid β peptide analogues of the preceding embodiment, wherein at least part of the amino acid sequence X₂₄X₂₅X₂₆X₂₇ forms the loop;
the amyloid β peptide analogues of the preceding embodiments, wherein the amino acid sequence Q consists of 3, 4, 5, or 6 amino acid residues;
the amyloid β peptide analogues of any one of the preceding embodiments, wherein the amino acid sequence of the amyloid β peptide analogue comprises the sequence X₂₀A₂₁E₂₂D₂₃X₂₄X₂₅X₂₆X₂₇X₂₈X₂₉A₃₀I₃₁ and each of X₂₀, X₂₄, X₂₅, X₂₆, X₂₇, X₂₈, X₂₉, independently represents an amino acid residue;
the amyloid β peptide analogues of the preceding embodiment, wherein the amino acid sequences X₂₀A₂₁E₂₂D₂₃ and X₂₈X₂₉A₃₀I₃₁ are in anti-parallel orientation;
the amyloid β peptide analogue of the preceding embodiments, wherein the interproton distance for at least one atom pair selected from the group consisting of A₂₁(NH)-A₃₀(NH),
A₂₁(NH)-A₃₀(CB), A₂₁(NH)—I₃₁(CD1), A₂₁(NH)—I₃₁(CG2), and A₃₀(NH)-A₂₁(CB) is 1.8 to 6.5 Angstroms;
the amyloid β peptide analogues of any one of the preceding embodiments, wherein the atom pairs A₂₁(CO)-A₃₀(N) and A₃₀(CO)-A₂₁(N) are at a distance of 3.3±0.5 Å, wherein CO indicates the backbone oxygen atom, and the phi (φ) angles of the residues range from −180 to −30 and psi (ψ) angles of the residues range from approximately 60 to 180 or from approximately −180 to −150;
the amyloid β peptide analogues of any one of the preceding embodiments, wherein the amino acid sequence of the amyloid β peptide analogue is a sequence selected from the group consisting of SEQ ID NO:699-960, wherein
X₁₂ is valine, leucine, isoleucine, alanine, methionine, or an amino acid residue which is covalently linked to another amino acid residue of the sequence;
X₁₃ is histidine, tyrosine, serine, methionine, or an amino acid residue which is covalently linked to another amino acid residue of the sequence;
X₁₄ is histidine, tyrosine, serine, methionine, or an amino acid residue which is covalently linked to another amino acid residue of the sequence;
X₁₅ is glutamine, asparagine, methionine, serine, or an amino acid which is covalently linked to another amino acid residue of the sequence;
X₁₆ is lysine, arginine, or an amino acid residue which is covalently linked to another amino acid residue of the sequence;
X₁₇ is leucine, isoleucine, valine, phenylalanine, methionine, or an amino acid residue which is covalently linked to another amino acid residue of the sequence;
X₁₈ is valine, leucine, isoleucine, alanine, methionine, or an amino acid residue which is covalently linked to another amino acid residue of the sequence;
X₁₉ is phenylalanine, tyrosine, valine, leucine, isoleucine, methionine, or an amino acid residue which is covalently linked to another amino acid residue of the sequence;
X₂₀ is phenylalanine, tyrosine, valine, leucine, isoleucine, methionine, or an amino acid residue which is covalently linked to another amino acid residue of the sequence;
X₂₄ is valine, leucine, isoleucine, alanine, methionine, or an amino acid residue which is covalently linked to another amino acid residue of the sequence;
X₂₅ is glycine, alanine, serine, or an amino acid residue which is covalently linked to another amino acid residue of the sequence;
X₂₆ is serine, glycine, alanine, threonine, or an amino acid residue which is covalently linked to another amino acid residue of the sequence;
X₂₇ is asparagine, glutamine, methionine, or an amino acid residue which is covalently linked to another amino acid residue of the sequence;
X₂₈ is lysine, arginine, or an amino acid residue which is covalently linked to another amino acid residue of the sequence;
X₂₉ is glycine, alanine, serine, or an amino acid residue which is covalently linked to another amino acid residue of the sequence;
X₃₀ is alanine, valine, glycine, serine, or an amino acid residue which is covalently linked to another amino acid residue of the sequence;
X₃₁ is isoleucine, leucine, valine, phenylalanine, methionine, or an amino acid residue which is covalently linked to another amino acid residue of the sequence;
X₃₂ is isoleucine, leucine, valine, phenylalanine, methionine, or an amino acid residue which is covalently linked to another amino acid residue of the sequence;
X₃₃ is glycine, alanine, serine, or an amino acid residue which is covalently linked to another amino acid residue of the sequence;
X₃₄ is leucine, isoleucine, valine, phenylalanine, methionine, or an amino acid residue which is covalently linked to another amino acid residue of the sequence;
X₃₅ is methionine, valine, leucine, isoleucine, alanine, or an amino acid residue which is covalently linked to another amino acid residue of the sequence;
X₃₆ is valine, leucine, isoleucine, alanine, methionine, or an amino acid residue which is covalently linked to another amino acid residue of the sequence;
X₃₇ is glycine, alanine, serine, or an amino acid residue which is covalently linked to another amino acid residue of the sequence;
X₃₈ is glycine, alanine, serine, or an amino acid residue which is covalently linked to another amino acid residue of the sequence; and
X₃₉ is valine, leucine, isoleucine, alanine, methionine, or an amino acid residue which is covalently linked to another amino acid residue of the sequence,
at least one amino acid residue selected from the group consisting of X₁₂, X₁₃, X₁₄, X₁₅, X₁₆, X₁₇, X₁₈, X₁₉, X₂₀, and at least one amino acid residue selected from the group consisting of X₂₉, X₃₀, X₃₁, X₃₂, X₃₃, X₃₄, X₃₅, X₃₆, X₃₇, X₃₈, X₃₉ being covalently linked with each other;
the amyloid β peptide analogues of the preceding embodiment, wherein at least one amino acid residue selected from the group consisting of X₁₂, X₁₃, X₁₄, and at least one amino acid residue selected from the group consisting of X₃₇, X₃₈, X₃₉ are covalently linked with each other, wherein at least one amino acid residue selected from the group consisting of X₁₃, X₁₄, X₁₅, and at least one amino acid residue selected from the group consisting of X₃₆, X₃₇, X₃₈ are covalently linked with each other, wherein at least one amino acid residue selected from the group consisting of X₁₄, X₁₅, X₁₆, and at least one amino acid residue selected from the group consisting of X₃₅, X₃₆, X₃₇ are covalently linked with each other, wherein at least one amino acid residue selected from the group consisting of X₁₅, X₁₆, X₁₇, and at least one amino acid residue selected from the group consisting of X₃₄, X₃₅, X₃₆ are covalently linked with each other, wherein at least one amino acid residue selected from the group consisting of X₁₆, X₁₇, X₁₈, and at least one amino acid residue selected from the group consisting of X₃₃, X₃₄, X₃₅ are covalently linked with each other; wherein at least one amino acid residue selected from the group consisting of X₁₇, X₁₈, X₁₉, and at least one amino acid residue selected from the group consisting of X₃₂, X₃₃, X₃₄ are covalently linked with each other, wherein at least one amino acid residue selected from the group consisting of X₁₈, X₁₉, X₂₀, and at least one amino acid residue selected from the group consisting of X₃₁, X₃₂, X₃₃ are covalently linked with each other, wherein at least one amino acid residue selected from the group consisting of X₁₉, X₂₀, and at least one amino acid residue selected from the group consisting of X₃₀, X₃₁, X₃₂ are covalently linked with each other, wherein amino acid residue X₂₀ and at least one amino acid residue selected from the group consisting of X₂₉, X₃₀, X₃₁ are covalently linked with each other, or wherein the amino acid residues X₁₂ and X₃₉, X₁₃ and X₃₈, X₁₄ and X₃₇, X₁₅ and X₃₆, X₁₆ and X₃₅, X₁₇ and X₃₄, X₁₈ and X₃₃, X₁₉ and X₃₂, or X₂₀ and X₃₁, are covalently linked with each other;
the amyloid β peptide analogues of any one of the preceding embodiments, wherein the amino acid residue is covalently linked via its side chain;
the amyloid β peptide analogues of the preceding embodiment, wherein the side chains of the amino acid residues has a functional group which is independently selected from the group consisting of thiol, amino, carboxyl and hydroxyl groups;
the amyloid β peptide analogues of any one of the preceding embodiments, wherein the amino acid residue that is covalently linked to the other amino acid residues is that of an amino acid residue selected from the group consisting of cysteine, lysine, aspartic acid and glutamic acid;
the amyloid β peptide analogues of the preceding embodiment, wherein the side chains of a cysteine and a cysteine, a cysteine and a lysine, an aspartic acid or a glutamic acid and a lysine, or alysine and a lysine are covalently linked with each other;
the amyloid β peptide analogues of any one of the preceding embodiments, wherein the side chains are covalently linked via a direct covalent bond;
the amyloid β peptide analogues of any one of the preceding embodiments, wherein the side chains are covalently linked via a linker;
the amyloid β peptide analogues of the preceding embodiment, wherein the linker is a homobifunctional or a heterobifunctional linker;
the amyloid β peptide analogues of the preceding embodiment, wherein the linker is a photo-reactive linker;
the amyloid β peptide analogues of any one of the preceding embodiments, wherein covalent linkage comprises a disulfide bond;
the amyloid β peptide analogues of any one of the preceding embodiments, wherein covalent linkage comprises an amide bond;
the amyloid β peptide analogues of any one of the preceding embodiments, wherein the amino acid sequence of the amyloid β peptide analogue comprises one covalent linkage between 2 non-contiguous amino acid residues.

[0021] According to a third aspect, the present invention relates to oligomers comprising a plurality of said amyloid β peptide analogues.

[0022] Particular embodiments of the oligomers include the following:

the oligomers, wherein the plurality is 2 to 28 amyloid β peptide analogues;
the oligomers of the preceding embodiments, wherein the amino acid sequence of each amyloid β peptide analogue comprises the sequence L₃₄M₃₅V₃₆G₃₇G₃₈, with the sequence L^{A}₃₄M^{A}₃₅V^{A}₃₆G^{A}₃₇G^{A}₃₈ of one amyloid β peptide analogue being in parallel orientation to the sequence L^{B}₃₄M^{B}₃₅V^{B}₃₆G^{B}₃₇G^{B}₃₈ of another amyloid β peptide analogue;
the oligomers of the preceding embodiment, wherein the interproton distance for at least one atom pair selected from the group consisting of M^{A}₃₅(NH)—V^{B}₃₆(NH), G^{A}₃₇(NH)-G^{B}₃₈(NH), L^{A}₃₄(NH)-L^{B}₃₄(C_{δ}H₃), M^{A}₃₅(NH)—V^{B}₃₆(CγH₃) is 1.8 to 6.5 Angstroms;
the oligomers of any one of the preceding embodiments, wherein the amino acid sequence of each amyloid β peptide analogue comprises the sequence G₃₃L₃₄M₃₅V₃₆G₃₇G₃₈V₃₉, with the sequence G^{A}₃₃L^{A}₃₄M^{A}₃₅V^{A}₃₆G^{A}₃₇G^{A}₃₈V^{A}₃₉ of one amyloid β peptide analogue being in parallel orientation to the sequence G^{B}₃₃L^{B}₃₄M^{B}₃₅V^{B}₃₆G^{B}₃₇G^{B}₃₈V^{B}₃₉ of another amyloid β peptide analogue;
the oligomers of the preceding embodiment, wherein the interproton distance for at least one atom pair selected from the group consisting of G^{A}₃₃(NH)-G^{B}₃₄(NH), M^{A}₃₅(NH)—V^{B}₃₆(NH), G^{A}₃₇(NH)-G^{B}₃₈(NH), L^{A}₃₄(NH)-L^{B}₃₄(C_{δ}H₃), M^{A}₃₅(NH)—V^{B}₃₆(CyH₃), G^{A}₃₈(NH)—V^{B}₃₉(CγH₃) and V^{A}₃₉(NH)—V^{B}₃₉(CγH₃) is 1.8 to 6.5 Angstroms;
the oligomers of any one of the preceding embodiments, wherein the oligomers comprise an inter-molecular parallel β-sheet;
the oligomers of the preceding embodiment, wherein the β-sheet comprises the amino acid sequence G^{A}₃₃L^{A}₃₄M^{A}₃₅V^{A}₃₆G^{A}₃₇G^{A}₃₈V^{A}₃₉ of one amyloid β peptide analogue and the amino acid sequence G^{A}₃₃L^{A}₃₄M^{A}₃₅V^{A}₃₆G^{A}₃₇G^{A}₃₈V^{A}₃₉ of another amyloid β peptide analogue; the oligomers of the preceding embodiment, wherein the atom pairs G^{A}33(CO)-L^{B}34(N), L^{B}34(CO)-M^{A}35(N), M^{A}35(CO)—V^{B}36(N), V^{B}36(CO)-G^{A}37(N), and G^{B}37(CO)-G^{A}38(N) are at a distance of 3.3±0.5 Å, wherein CO indicates the backbone oxygen atom, and the phi (φ) angles of the residues range from −180 to −30 and psi (ψ) angles of the residues range from approximately 60 to 180 or from approximately −180 to −150.

[0023] A further particular embodiment includes the amyloid β peptide analogues or oligomers of any one of the preceding embodiments, which comprise an epitope recognized by a monoclonal antibody selected from the group consisting of the monoclonal antibody 5F7 obtainable from a hybridoma designated by American Type Culture Collection deposit number PTA-7241, the monoclonal antibody 7C6 obtainable from a hybridoma designated by American Type Culture Collection deposit number PTA-7240, the monoclonal antibody 4D10 obtainable from a hybridoma designated by American Type Culture Collection deposit number PTA-7405, or the monoclonal antibody 7E5 obtainable from a hybridoma designated by American Type Culture Collection deposit number PTA-7809.

[0024] The present invention also relates to a process for preparing an amyloid β peptide analogue as defined herein, which process comprises
[0025] (i) providing a peptide or peptidomimetic thereof;
[0026] (ii) subjecting the peptide or peptidomimetic to conditions sufficient for the formation of the linkage.

[0027] The present invention also relates to a process for preparing an oligomer as defined herein, which process comprises
[0028] (i) providing a peptide or peptidomimetic thereof;
[0029] (ii) subjecting the peptide or peptidomimetic to conditions sufficient for the formation of the oligomer and linkage.

[0030] Particular embodiments of the processes include processes, wherein the oligomer formation precedes that linkage formation.

[0031] Further, the present invention relates to compositions comprising an amyloid β peptide analogue or oligomer as defined herein.

[0032] Particular embodiments of the processes include composition, wherein the composition is a vaccine and further comprises a pharmaceutical acceptable carrier.

[0033] The present invention also relates to the use of an amyloid β peptide analogue or oligomer as defined herein for preparing a pharmaceutical composition for treating or preventing an amyloidosis and to corresponding methods of treating or preventing an amyloidosis in a subject in need thereof, which comprises administering an amyloid β peptide analogue or oligomer as defined herein to the subject.

[0034] Particular embodiments of the use and methods include the following: the use and methods, wherein the pharmaceutical composition is for active immunization; the use and methods of the preceding embodiments, wherein the amyloidosis is Alzheimer's disease or wherein the amyloidosis is the amyloidosis of Down's syndrome.

[0035] The present invention also relates to the use of an amyloid β peptide analogue or oligomer as defined herein for preparing a composition for diagnosing an amyloidosis and to corresponding methods of diagnosing an amyloidosis which comprises providing a sample from the subject suspected of having the amyloidosis, contacting the sample with an amyloid β peptide analogue or oligomer as defined herein for a time and under conditions sufficient for the formation of a complex comprising the amyloid β peptide analogue or oligomer and an antibody, the presence of the complex indicating the subject has the amyloidosis.

[0036] Particular embodiments of the use and methods include the use and methods, wherein the amyloidosis is Alzheimer's disease or wherein the amyloidosis is the amyloidosis of Down's syndrome.

[0037] Further, the present invention relates to a method of enriching an agent capable of binding to an amyloid β peptide analogue or oligomer as defined herein in a preparation comprising said agent, which method comprises the steps of: a) exposing to the amyloid β peptide analogue or oligomer the preparation comprising the agent for a time and under conditions sufficient for the agent to bind to amyloid β peptide analogue or oligomer; and b) obtaining the agent in enriched form.

[0038] Particular embodiments of the use and methods include the use and methods, wherein the agent is an antibody, an aptamer or a small molecular weight compound.

[0039] Also, the present invention relates to the use of an amyloid β peptide analogue or oligomer as defined herein for providing an agent that is capable of binding to the amyloid β peptide analogue or oligomer and to corresponding methods, e.g. a method of providing an antibody capable of binding to an amyloid β peptide analogue or oligomer as defined herein, which comprises
[0040] i) providing an antigen comprising the amyloid β peptide analogue or oligomer;
[0041] ii) exposing an antibody repertoire to said antigen; and
[0042] iii) selecting from said repertoire an antibody which binds to the amyloid β peptide analogue or oligomer.

[0043] Particular embodiments of the use and methods include the use and methods, wherein the agent is an antibody, a non-antibody binding molecule, an aptamer or a small molecular weight compound.

[0044] Antibodies which are obtainable by said process are also described as well as agents capable of binding to an amyloid β peptide analogue or oligomer of the invention.

[0045] Further, the present invention describes compositions comprising an agent capable of binding to an amyloid β peptide analogue or oligomer of the invention; the use of an agent capable of binding to an amyloid β peptide analogue or oligomer of the invention for preparing a pharmaceutical composition for treating or preventing an amyloidosis and corresponding methods of treating or preventing an amyloidosis in a subject in need thereof, which comprises administering an agent capable of binding to an amyloid β peptide analogue or oligomer of the invention to the subject; the use of an agent capable of binding to an amyloid β peptide analogue or oligomer of the invention for preparing a composition for diagnosing an amyloidosis and corresponding methods of diagnosing an amyloidosis which comprises providing a sample from the subject suspected of having the amyloidosis, contacting the sample with an agent capable of binding to an amyloid β peptide analogue or oligomer of the invention for a time and under conditions sufficient for the formation of a complex comprising the agent and an antigen, the presence of the complex indicating the subject has the amyloidosis.

### BRIEF DESCRIPTION OF DRAWINGS

[0046] FIG. 1 shows (A) a diagram of the NMR derived structure of Aβ pre-globulomer, depicting the inter-residue NOE's used to define the three-dimensional fold; dashed lines indicate observed NOEs and circles the backbone amides that exhibit slow exchange in the NH/ND exchange experiments; (B) a ribbon diagram depicting NMR derived structure of Aβ pre-globulomer in SDS; residues with defined structure are high-lighted in bold text; (C) a diagram of one monomer observed in the NMR Aβ pre-globulomer structure, showing the Leu to Cys mutations; (D) a diagram of one monomer observed in the NMR Aβ pre-globulomer structure, showing the Leu to Cys mutations and the resulting disulfide cross-link structure.

[0047] FIG. 2 shows (A) an SDS-PAGE gel with typical Aβ globulomer banding pattern formed from globulomers made with S#6046: wt N-Met Aβ(1-42) peptide, Mut Pre: (17C, 34C) N-Met Aβ(1-42) mutant peptide in 0.2% SDS, Mut Post: (L17C, L34C) N-Met Aβ(1-42) mutant peptide in 0.05% SDS; (B) an SDS-PAGE of 1) marker proteins, 2) (14C, 37C) N-Met Aβ(1-42) oligomer, 3) (14C, 37C) N-Met Aβ(1-42) oligomer after thermolysin digestion, 4) (15C, 36C) N-Met Aβ(1-42) oligomer, 5) (15C, 36C) N-Met Aβ(1-42) oligomer after thermolysin digestion, 6) (16C, 35C) N-Met Aβ(1-42) oligomer, 7) (16C, 35C) N-Met Aβ(1-42) oligomer after thermolysin digestion, 8) (17C, 34C) N-Met Aβ(1-42) oligomer, 9) (17C, 34C) N-Met Aβ(1-42) oligomer after thermolysin digestion, 10) (18C, 33C) N-Met Aβ(1-42) oligomer, 11) (18C, 33C) N-Met Aβ(1-42) oligomer after thermolysin digestion; (C) an SDS-PAGE of 1) marker proteins, 2) (19C, 32C) N-Met Aβ(1-42) oligomer, 3) (19C, 32C) N-Met Aβ(1-42) oligomer after thermolysin digestion, 4) (20C, 31C) N-Met Aβ(1-42) oligomer, 5) (20C, 31C) N-Met Aβ(1-42) oligomer after thermolysin digestion, 6) (21C, 30C) N-Met Aβ(1-42) oligomer, 7) (21C, 30C) N-Met Aβ(1-42) oligomer after thermolysin digestion, 8) (22C, 29C) N-Met Aβ(1-42) oligomer, 9) (22C, 29C) N-Met Aβ(1-42) oligomer after thermolysin digestion, 10) Aβ(1-42) globulomer, 11) Aβ(1-42) globulomer after thermolysin digestion; (D) an SDS-PAGE of 1) (17K, 34E) N-Met Aβ(1-42) oligomer (0.2% SDS), 2) (17K, 34E) N-Met Aβ(1-42) oligomer (0.05% SDS), 3) (17C(ACM), 34C(ACM)) Aβ(16-35) oligomer (0.2% SDS), 4) (17C(ACM), 34C(ACM)) Aβ(16-35) oligomer (0.05% SDS), 5) (17K, 34C) N-Met Aβ(1-42) oligomer (0.2% SDS), 6) (17K, 34C) N-Met Aβ(1-42) oligomer (0.05% SDS), 7) (17C, 34C) Aβ(16-42) oligomer (0.2% SDS), 8) (17C, 34C) Aβ(16-42) oligomer (0.05% SDS), 9) (17KC, 34C) Aβ(13-42) oligomer (0.2% SDS), 10) (17KC, 34C) Aβ(13-42) oligomer (0.05% SDS), 11) N-Met Aβ(1-42) oligomer. Standards (lanes 1 and 5 of (A) and marker proteins of (B) and (C)) are: myosin (210 kDa), phosphorylase (98 kDa), BSA (78 kDa), glutamic dehydrogenase (55 kDa), alcohol dehydrogenase (45 kDa), carbonic anhydrase (34 kDa), myoglobin red (17 kDa), lysozyme (16 kDa), aprotinin (7 kDa) and insulin (4 kDa). The attributes of the banding pattern are: a cluster of bands-40-50 kDa, a cluster of bands ˜15 kDa, and a band at ˜5 kDa (monomer).

[0048] FIG. 3 shows (A) a comparison of direct Elisa response of N-Met Aβ(1-42) globulomer and (L17C, L34C) N-Met Aβ(1-42) mutant globulomer to the globulomer-specific monoclonal antibody 5F7;

(B) a comparison of direct ELISA results comparing the apparent binding affinity of the globulomer-specific mAb 5F7 to disulfide stabilized (17C, 34C) N-Met Aβ(1-42) mutant globulomer vs. the same mutant globulomer truncated at residue 20 by enzymatic cleavage with thermolysin;
(C) a comparison of direct ELISA results comparing the apparent binding affinity of the globulomer-specific mAb 7C6 to disulfide stabilized (17C, 34C) N-Met Aβ(1-42) mutant globulomer vs. the same mutant globulomer truncated at residue 20 by enzymatic cleavage with thermolysin;
(D) a comparison of direct ELISA results comparing the apparent binding affinity of the globulomer-specific rabbit polyclonal antiserum 5599 to disulfide stabilized (17C, 34C) N-Met Aβ(1-42) mutant globulomer vs. the same mutant globulomer truncated at residue 20 by enzymatic cleavage with thermolysin;
(E) a comparison of direct ELISA results comparing the apparent binding affinity of the globulomer-specific mAb 5F7 to disulfide stabilized (17C, 34C) Aβ(16-35) oligomer vs. the same oligomer truncated at residue 20 by enzymatic cleavage with thermolysin;
(F) a comparison of direct ELISA results comparing the apparent binding affinity of the globulomer-specific mAb 7C6 to disulfide stabilized (17C, 34C) Aβ(16-35) oligomer vs. the same oligomer truncated at residue 20 by enzymatic cleavage with thermolysin;
(G) a comparison of direct ELISA results comparing the apparent binding affinity of the globulomer-specific rabbit polyclonal antiserum 5599 to disulfide stabilized (17C, 34C) Aβ(16-35) oligomer vs. the same oligomer truncated at residue 20 by enzymatic cleavage with thermolysin;
(H) a comparison of direct ELISA results comparing the apparent binding affinity of the globulomer-specific mAb 5F7 to Aβ(16-35) oligomer vs. the same oligomer truncated at residue 20 by enzymatic cleavage with thermolysin;
(I) a comparison of direct ELISA results comparing the apparent binding affinity of the globulomer-specific mAb 7C6 to Aβ(16-35) oligomer vs. the same oligomer truncated at residue 20 by enzymatic cleavage with thermolysin;
(J) a comparison of direct ELISA results comparing the apparent binding affinity of the globulomer-specific rabbit polyclonal antiserum 5599 to Aβ(16-35) oligomer vs. the same oligomer truncated at residue 20 by enzymatic cleavage with thermolysin;
(K) a comparison of direct ELISA results comparing the apparent binding affinity of the globulomer-specific mAb 5F7 to (17C(ACM), 34C(ACM)) Aβ(16-35) oligomer vs. the same oligomer truncated at residue 20 by enzymatic cleavage with thermolysin;
(L) a comparison of direct ELISA results comparing the apparent binding affinity of the globulomer-specific mAb 7C6 to (17C(ACM), 34C(ACM)) Aβ(16-35) oligomer vs. the same oligomer truncated at residue 20 by enzymatic cleavage with thermolysin;
(M) a comparison of direct ELISA results comparing the apparent binding affinity of the globulomer-specific rabbit polyclonal antiserum 5599 to (17C(ACM), 34C(ACM)) Aβ(16-35) oligomer vs. the same oligomer truncated at residue 20 by enzymatic cleavage with thermolysin;
(N) a comparison of direct ELISA results comparing the apparent binding affinity of the globulomer-specific mAb 5F7 to disulfide stabilized (17C, 34C) Aβ(16-35) oligomer (cyclised before oligomer formation) vs. the same oligomer truncated at residue 20 by enzymatic cleavage with thermolysin;
(O) a comparison of direct ELISA results comparing the apparent binding affinity of the globulomer-specific mAb 7C6 to disulfide stabilized (17C, 34C) Aβ(16-35) oligomer (cyclised before oligomer formation) vs. the same oligomer truncated at residue 20 by enzymatic cleavage with thermolysin;
(P) a comparison of direct ELISA results comparing the apparent binding affinity of the globulomer-specific rabbit polyclonal antiserum 5599 to disulfide stabilized (17C, 34C) Aβ(16-35) oligomer (cyclised before oligomer formation) vs. the same oligomer truncated at residue 20 by enzymatic cleavage with thermolysin;
(Q) a comparison of direct ELISA results comparing the apparent binding affinity of the globulomer-specific mAb 5F7 to disulfide stabilized (17C, 34C) Aβ(16-35) oligomer (cyclised before oligomer formation) vs. disulfide stabilized (17C, 34C) Aβ(16-42), (17C, 34C) Aβ(16-35) and (17C, 34C) N-Met Aβ(1-42) oligomer (all cyclised after oligomer formation);
(R) a comparison of direct ELISA results comparing the apparent binding affinity of the globulomer-specific mAb 5F7 to thermolysin truncated disulfide stabilized (17C, 34C) Aβ(16-35) oligomer (cyclised before oligomer formation) vs. thermolysin truncated disulfide stabilized (17C, 34C) Aβ(16-42), (17C, 34C) Aβ(16-35) and (17C, 34C) N-Met Aβ(1-42) oligomer (all cyclised after oligomer formation);
(S) a comparison of direct ELISA results comparing the apparent binding affinity of the globulomer-specific mAb 5F7 to disulfide stabilized (17C, 34C) Aβ(16-42) oligomer vs. the same oligomer truncated at residue 20 by enzymatic cleavage with thermolysin;
(T) a comparison of direct ELISA results comparing the apparent binding affinity of the globulomer-specific mAb 7C6 to disulfide stabilized (17C, 34C) Aβ(16-42) oligomer vs. the same oligomer truncated at residue 20 by enzymatic cleavage with thermolysin;
(U) a comparison of direct ELISA results comparing the apparent binding affinity of the globulomer-specific rabbit polyclonal antiserum 5599 to disulfide stabilized (17C, 34C) Aβ(16-42) oligomer vs. the same oligomer truncated at residue 20 by enzymatic cleavage with thermolysin;
(V) a comparison of direct ELISA results comparing the apparent binding affinity of the globulomer-specific mAb 5F7 to disulfide stabilized (17C, 34C) Aβ(12-42) oligomer vs. the same oligomer truncated at residue 20 by enzymatic cleavage with thermolysin;
(W) a comparison of direct ELISA results comparing the apparent binding affinity of the globulomer-specific mAb 7C6 to disulfide stabilized (17C, 34C) Aβ(12-42) oligomer vs. the same oligomer truncated at residue 20 by enzymatic cleavage with thermolysin;
(X) a comparison of direct ELISA results comparing the apparent binding affinity of the globulomer-specific rabbit polyclonal antiserum 5599 to disulfide stabilized (17C, 34C) Aβ(12-42) oligomer vs. the same oligomer truncated at residue 20 by enzymatic cleavage with thermolysin;
(Y) direct ELISA results comparing the apparent binding affinity of the globulomer-specific mAb 5F7 to disulfide stabilized (17C, 34C) (K insertion) Aβ(13-42) oligomer;
(Z) direct ELISA results comparing the apparent binding affinity of the globulomer-specific mAb 7C6 to disulfide stabilized (17C, 34C) (K insertion) Aβ(13-42) oligomer;
(AA) direct ELISA results comparing the apparent binding affinity of the globulomer-specific rabbit polyclonal antiserum 5599 to disulfide stabilized (17C, 34C) (K insertion) Aβ(13-42) oligomer.

[0049] FIG. 4 shows mass spectra obtained from Aβ globulomers formed with the (L17C, L34C) N-Met Aβ(1-42) mutant peptide under (A) disulfide bond forming conditions and (B) after reduction with DTT; mass spectra obtained from (17C, 34C) Aβ(16-35) oligomer under (C) disulfide bond forming conditions and (D) after reduction with DTT; mass spectra obtained from (17C, 34C) Aβ(16-42) oligomer under (E) disulfide bond forming conditions and (F) after reduction with DTT; mass spectra obtained from (17C, 42C) Aβ(12-42) oligomer under (G) disulfide bond forming conditions and (H) after reduction with DTT; mass spectra obtained from (17KC, 42C) Aβ(13-42) oligomer under (I) disulfide bond forming conditions and (J) after reduction with DTT; complete isotopic deconvolution is shown.

[0050] FIG. 5 shows (A) a sedimentation velocity analysis of heterogeneity of N-Met Aβ(1-42) globulomer (dashed line) and disulfide stabilized (L17C, L34C) N-Met Aβ(1-42) mutant globulomer (solid line) in 5 mM NaPO₄, 35 mM NaCl, pH 7.4; (B) a sedimentation velocity analysis of heterogeneity N-Met Aβ(1-42) globulomer (dashed line) and disulfide stabilized (L17C, L34C) N-Met Aβ(1-42) mutant globulomer truncated at residue 20 by enzymatic cleavage with thermolysin (solid line) in 5 mM NaPO₄, 35 mM NaCl, pH 7.4 supplemented with 0.05% SDS; (C) a sedimentation velocity analysis of heterogeneity of disulfide stabilized (L17C, L34C) N-Met Aβ(1-42) mutant globulomer truncated at residue 20 by enzymatic cleavage with thermolysin (solid line) in 5 mM NaPO₄, 35 mM NaCl, pH 7.4.

[0051] FIG. 6 is a table indicating the peptide masses of the (xC, yC) N-Met Aβ(1-42) oligomers before and after thermolysin digestion detected by SELDI-MS.

[0052] FIG. 7 is a table indicating peptide mass peaks of iodoacetamide treated thermolysin truncated (xC, yC) N-Met Aβ(1-42) oligomers or thermolysin truncated Aβ(1-42) globulomer detected by SELDI-MS.

[0053] FIG. 8 shows dot blot analyses of the reactivity with

1. (14C, 37C) N-Met Aβ(1-42) oligomer;
2. thermolysin truncated (14C, 37C) N-Met Aβ(1-42) oligomer;
3. (15C, 36C) N-Met Aβ(1-42) oligomer;
4. thermolysin truncated (15C, 36C) N-Met Aβ(1-42) oligomer;
5. (16C, 35C) N-Met Aβ(1-42) oligomer;
6. thermolysin truncated (16C, 35C) N-Met Aβ(1-42) oligomer;
7. (17C, 34C) N-Met Aβ(1-42) oligomer;
8. thermolysin truncated (17C, 34C) N-Met Aβ(1-42) oligomer;
9. (18C, 33C) N-Met Aβ(1-42) oligomer;
10. thermolysin truncated (18C, 33C) N-Met Aβ(1-42) oligomer;
11. (19C, 32C) N-Met Aβ(1-42) oligomer;
12. thermolysin truncated (19C, 32C) N-Met Aβ(1-42) oligomer;
13. (20C, 31C) N-Met Aβ(1-42) oligomer;
14. thermolysin truncated (20C, 31C) N-Met Aβ(1-42) oligomer;
15. (21C, 30C) N-Met Aβ(1-42) oligomer;
16. thermolysin truncated (21C, 30C) N-Met Aβ(1-42) oligomer;
17. (22C, 29C) N-Met Aβ(1-42) oligomer;
18. thermolysin truncated (22C, 29C) N-Met Aβ(1-42); oligomer
19. Aβ(1-42) globulomer; and
20. Aβ(1-42) thermolysin truncated globulomer
of A) monoclonal antibody 7C6 and B) rabbit polyclonal antibody 5599.

[0054] FIG. 9 is a table indicating peptide mass peaks of iodoacetamide treated thermolysin truncated (17C, 34C) N-Met Aβ(16-35) oligomers detected by SELDI-MS.

[0055] FIG. 10 is a table indicating amounts of immunoprecipitated (17C, 34C) Aβ(16-35) oligomer (A) without prior iodoacetamide alkylation and (B) after iodoacetamide alkylation in the presence of DTT.

[0056] FIG. 11 shows a schematic diagram indicating the position of cross-links of (17K, 34C) N-Met Aβ(1-42) upon treatment with (A) sulfo-SMCC, (B) sulfo-MBS or (C) sulfo-SIAB at either K16 or K17; and (D) a schematic diagram indicating the position of potential cross links of (17K, 34E) N-Met Aβ(1-42) upon treatment with EDAC/NHS.

[0057] FIG. 12 shows (A) the mass spectrum (ESI) of oligomers made with (17K, 34C) N-Met Aβ(1-42) peptide after cross-linking reaction with the heterobifunctional cross-linking reagent sulfo-SMCC; (B) the mass spectrum (MALDI) of globulomers made with (17K, 34C) N-Met Aβ(1-42) peptide after cross-linking reaction with the heterobifunctional cross-linking reagent sulfo-MBS; (C) the mass spectrum (ESI) of globulomers made with (17K, 34C) N-Met Aβ(1-42) peptide after cross-linking reaction with the heterobifunctional cross-linking reagent sulfo-SIAB; and (D) the mass spectrum (MALDI) of globulomers made with (17K, 34E) N-Met Aβ(1-42) peptide after cross-linking reaction with the heterobifunctional cross-linking reagent EDC and NHS. The arrows indicates the expected mass after the desired cross-link forms.

[0058] FIG. 13 shows (A) a comparison of direct Elisa response of (17K, 34C) N-Met Aβ(1-42) oligomer without cross-link with disulfide-stabilized (17C, 34C) N-Met Aβ(1-42) oligomer to (A) the globulomer-specific monoclonal antibody 5F7; (B) the globulomer-specific monoclonal antibody 7C6; and (C) the globulomer-specific rabbit polyclonal antiserum 5599.

[0059] FIG. 14 shows (A) a comparison of direct Elisa response of (17K, 34C) N-Met Aβ(1-42) oligomer without cross-link with (17K, 34C) N-Met Aβ(1-42) oligomer cross-linked with SMCC before and after thermolysin truncation to (A) the globulomer-specific monoclonal antibody 5F7; (B) the globulomer-specific monoclonal antibody 7C6; and (C) the globulomer-specific rabbit polyclonal antiserum 5599.

[0060] FIG. 15 shows (A) a comparison of direct Elisa response of (17K, 34C) N-Met Aβ(1-42) oligomer without cross-link with (17K, 34C) N-Met Aβ(1-42) oligomer cross-linked with MBS before and after thermolysin truncation to (A) the globulomer-specific monoclonal antibody 5F7; (B) the globulomer-specific monoclonal antibody 7C6; and (C) the globulomer-specific rabbit polyclonal antiserum 5599.

[0061] FIG. 16 shows (A) a comparison of direct Elisa response of (17K, 34C) N-Met Aβ(1-42) oligomer without cross-link with (17K, 34C) N-Met Aβ(1-42) oligomer cross-linked with SIAB before and after thermolysin truncation to (A) the globulomer-specific monoclonal antibody 5F7; (B) the globulomer-specific monoclonal antibody 7C6; and (C) the globulomer-specific rabbit polyclonal antiserum 5599.

[0062] FIG. 17 shows (A) a comparison of direct Elisa response of (17C, 34E) N-Met Aβ(1-42) oligomer without cross-link with disulfide-stabilized (17C, 34C) N-Met Aβ(1-42) oligomer to (A) the globulomer-specific monoclonal antibody 5F7; (B) the globulomer-specific monoclonal antibody 7C6; and (C) the globulomer-specific rabbit polyclonal antiserum 5599.

[0063] FIG. 18 shows (A) a comparison of direct Elisa response of (17K, 34C) N-Met Aβ(1-42) oligomer without cross-link with (17K, 34C) N-Met Aβ(1-42) oligomer cross-linked with EDC/NHS before and after thermolysin truncation to (A) the globulomer-specific monoclonal antibody 5F7; (B) the globulomer-specific monoclonal antibody 7C6; and (C) the globulomer-specific rabbit polyclonal antiserum 5599.

[0064] FIG. 19 shows a schematic diagram indicating strategies for (A) forming a methylenedithioether linkage; (B) performing a ring closing metathesis reaction between allylglycines; (C) performing a ring closing metathesis reaction between the modified amino acids X═(S)-Fmoc-α(2′ pentenyl)alanine; and (D) perfoming click chemistry of Lys(N3) and propargylglycine amino acids.

### DETAILED DESCRIPTION OF THE INVENTION

[0065] The amyloid β peptide analogues of the present invention comprise an amino acid sequence (peptide) or a peptidomimetic of an amino acid sequence.

[0066] An embodiment is an amyloid β peptide analogue comprising an amino acid sequence, wherein the sequence (i) forms a loop, (ii) has at least 66% identity to native human Aβ peptide or a portion thereof, (iii) comprises at least 6 contiguous amino acid residues and (iv) has at least 2 non-contiguous amino acid residues which are covalently linked with each other; or a derivative thereof.

[0067] According to a particular embodiment, the amyloid β peptide analogues of the present invention do not comprise any further amino acid or any further peptidomimetic of an amino acid than said amino acid sequence or said peptidomimetic of the amino acid sequence (but the amyloid β peptide analogues of the present invention may comprise further chemical groups or moieties which are attached said amino acid sequence or peptidomimetic). According to one aspect, the amino acid sequence consists of up to 45, 44, 43, 42, 41, 40, 39, 34, 33, 32, 31, 30, 29, 28, 27, 26, 25, 24, 23, 20, 16 amino acids (or a corresponding peptidomimetic). According to another aspect, the amino acid sequence consists of at least 10, 11, 12, 13, 14, 15, 16 amino acids (or a corresponding peptidomimetic).

[0068] Unless otherwise indicated, the term “amino acid” as employed herein, alone or as part of another group, includes, without limitation, an amino group and a carboxyl group linked to the same carbon, referred to as “α” carbon —CRR′—, where R and/or R′ can be a natural or an un-natural side chain, including hydrogen. The absolute “S” configuration at the “α” carbon is commonly referred to as the “L” or “natural” configuration. In the case where both the “R” and the “R′” (prime) substituents equal hydrogen, the amino acid is glycine and is not chiral. Amino acids include the genetically encoded L-enantiomeric amino acids (such as alanine (A Ala), arginine (R; Arg), asparagine (N; Asn), aspartic acid (D; Asp). cysteine (C; Cys), glutamine (Q; Gln), glutamic acid (E; Glu), glycine (G; Gly), histidine (H; His), isoleucine (I; Ile), leucine (L; Leu), lysine (K; Lys), phenylalanine (F; Phe), proline (P; Pro), serine (S; Ser), threonine (T; Thr), tryptophan (W; Trp), tyrosine (Y; Tyr), valine (V; Val)), the corresponding D-amino acids, as well as a number of genetically non-encoded amino acids which include, but are not limited to, β-alanine (β-Ala) and other omega-amino acids such as 3-aminopropionic acid, 2,3-diaminopropionic acid (Dpr), 4-aminobutyric acid and so forth; α-aminoisobutyric acid (Aib); ε-aminohexanoic acid (Aha); δ-aminovaleric acid (Ava); N-methylglycine or sarcosine (MeGly); ornithine (Orn); citrulline (Cit); t-butylalanine (t-BuA); t-butylglycine (t-BuG); N-methylisoleucine (Melle); phenylglycine (Phg); cyclohexylalanine (Cha); norleucine (Nle); naphthylalanine (NaI); 4-phenylphenylalanine, 4-chlorophenylalanine (Phe(4-Cl)); 2-fluorophenylalanine (Phe(2-F)); 3-fluorophenylalanine (Phe(3-F)); 4-fluorophenylalanine (Phe(4-F)); penicillamine (Pen); 1,2,3,4-tetrahydroisoquinoline-3-carboxylic acid (Tic); β-2-thienylalanine (Thi); methionine sulfoxide (MSO); homoarginine (hArg); N-acetyl lysine (AcLys); 2,4-diaminobutyric acid (Dbu); 2,3-diaminobutyric acid (Dab); p-aminophenylalanine (Phe (pNH₂)); N-methyl valine (MeVal); homocysteine (hCys), homophenylalanine (hPhe) and homoserine (hSer); hydroxyproline (Hyp), homoproline (hPro), N-methylated amino acids and peptoids (N-substituted glycines).

[0069] For purposes of determining conservative amino acid substitutions, the amino acids can be conveniently classified into two main categories—hydrophilic and hydrophobic—depending primarily on the physical-chemical characteristics of the amino acid side chain. These two main categories can be further classified into subcategories that more distinctly define the characteristics of the amino acid side chains. For example, the class of hydrophilic amino acids can be further subdivided into acidic, basic and polar amino acids. The class of hydrophobic amino acids can be further subdivided into nonpolar and aromatic amino acids.

[0070] The term “hydrophilic amino acid” refers to an amino acid exhibiting a hydrophobicity of less than zero according to the normalized consensus hydrophobicity scale of Eisenberg et al., 1984, J. Mol. Biol. 179:125-142. Genetically encoded hydrophilic amino acids include Thr (T), Ser (S), H is (H), Glu (E), Asn (N), Gln (O), Asp (D), Lys (K) and Arg (R).

[0071] The term “hydrophobic amino acid” refers to an amino acid exhibiting a hydrophobicity of greater than zero according to the normalized consensus hydrophobicity scale of Eisenberg, 1984, J. Mol. Biol. 179: 1.25-142. Genetically encoded hydrophobic amino acids include Pro (P), Ile (I), Phe (F), Val (V), Leu (L), Trp (W), Met (M), Ala (A), Gly (G) and Tyr (Y).

[0072] The term “acidic amino acid” refers to a hydrophilic amino acid having a side chain pK value of less than 7. Acidic amino acids typically have negatively charged side chains at physiological pH due to loss of a hydrogen ion. Genetically encoded acidic amino acids include Glu (E) and Asp (D).

[0073] The term “basic amino acid” refers to a hydrophilic amino acid having a side chain pK value of greater than 7. Basic amino acids typically have positively charged side chains at physiological pH due to association with hydronium ion. Genetically encoded basic amino acids include His (H), Arg (R) and Lys (K).

[0074] The term “polar amino acid” refers to a hydrophilic amino acid having a side chain that is uncharged at physiological pH, but which has at least one bond in which the pair of electrons shared in common by two atoms is held more closely by one of the atoms. Genetically encoded polar amino acids include Asn (N), Gln (Q) Ser (S) and Thr (T).

[0075] The term “nonpolar amino acid” refers to a hydrophobic amino acid having a side chain that is uncharged at physiological pH and which has bonds in which the pair of electrons shared in common by two atoms is generally held equally by each of the two atoms (i.e., the side chain is not polar). Genetically encoded nonpolar amino acids include Leu (L), Val (V), Ile (I), Met (M), Gly (G) and Ala (A).

[0076] The term “aromatic amino acid” refers to a hydrophobic amino acid with a side chain having at least one aromatic or heteroaromatic ring. The aromatic or heteroaromatic ring may contain one or more substituents such as —OH, —SH, —CN, —F, —Cl, —Br, —I, —NO₂, —NO, —NH₂, —NHR, —NRR, —C(O)R, —C(O)OH, —C(O)OR, —C(O)NH₂, —C(O)NHR, —C(O)NRR and the like where each R is independently (C₁-C₆) alkyl, substituted (C₁-C₆) alkyl, (C₁-C₆) alkenyl, substituted (C₁-C₆) alkenyl, (C₁-C₆) alkynyl, substituted (C₁-C₆) alkynyl, (C₅-C₂₀) aryl, substituted (C₅-C₂₀) aryl, (C₆-C₂₆) alkaryl, substituted (C₆-C₂₆) alkaryl, 5-20-membered heteroaryl, substituted 5-20-membered heteroaryl, 6-26-membered alkheteroaryl or substituted 6-26-membered alkheteroaryl. Genetically encoded aromatic amino acids include Phe (F), Tyr (Y) and Trp (W).

[0077] The term “aliphatic amino acid” refers to a hydrophobic amino acid having an aliphatic hydrocarbon side chain. Genetically encoded aliphatic amino acids include Ala (A), Val (V), Leu (L) and Ile (I).

[0078] The amino acid residue Cys (C) is unusual in that it can form disulfide bridges with other Cys (C) residues or other sulfanyl-containing amino acids. The ability of Cys (C) residues (and other amino acids with —SH containing side chains) to exist in a peptide in either the reduced free —SH or oxidized disulfide-bridged form affects whether Cys (C) residues contribute net hydrophobic or hydrophilic character to a peptide.

[0079] As will be appreciated by those of skill in the art, the above-defined categories are not mutually exclusive. Thus, amino acids having side chains exhibiting two or more physical-chemical properties can be included in multiple categories. For example, amino acid side chains having aromatic moieties that are further substituted with polar substituents, such as Tyr (Y), may exhibit both aromatic hydrophobic properties and polar or hydrophilic properties, and can therefore be included in both the aromatic and polar categories. The appropriate categorization of any amino acid will be apparent to those of skill in the art, especially in light of the detailed disclosure provided herein.

[0080] Instead of a sequence of amino acids (peptide) the amyloid β peptide analogues of the invention may comprise an analogue of said sequence having properties analogous to those of the template amino acid sequence (peptide). These types of non-peptide sequences are termed “peptide mimetics” or “peptidomimetics” (Fauchere, J. (1986) Adv. Drug Res. 15: 29; Veber and Freidinger (1985) TINS p. 392; and Evans et al. (1987) J. Med. Chem. 30: 1229) and are usually developed with the aid of computerized molecular modeling.

[0081] The peptidomimetics are referred to as being “derivable from” a certain amino acid sequence. By this it is meant that the peptidomimetic is designed with reference to a defined amino acid sequence, such that it retains the structural features of the amino acid sequence which are essential for its function. This may be the particular side chains of the amino acid sequence, or hydrogen bonding potential of the structure. Such features may be provided by non-peptide components or one or more of the amino acid residues or the bonds linking said amino acid residues of the amino acid sequence may be modified so as to improve certain functions of the amino acid sequence such as stability or protease resistance, while retaining the structural features of the amino acid sequence which are essential for its function. In other words an amyloid β peptide analogue comprising a peptidomimetic of an amino acid sequence and the amyloid β peptide analogue comprising the amino acid sequence from which the peptidomimetic is derived have the same functional characteristics with respect to their ability to form the loop and, if applicable, to display the further structural and functional properties of the amyloid β peptide analogues as defined herein.

[0082] Peptidomimetics are usually structurally similar to the paradigm peptide (i.e., the amino acid sequence comprised by the amyloid β peptide analogues of the invention), but have one or more peptide linkages optionally replaced by a linkage similar to an amide linkage (e.g. an amide isostere such as an N-methyl amide, thioamide, thioester, phosphonate, ketomethylene, hydroxymethylene, fluorovinyl, (E)-vinyl, methyleneamino, methylenethio or alkane linkage). Such linkages may, in particular, be selected from the group consisting of: —CH₂—NH—, —CH₂—S—, —CH₂—CH₂—, —CH═CH— (cis and trans), —COCH₂—, —CH(OH)CH₂—, and —CH₂SO—. These linkages are well-known in the art and further described in the following references: Spatola, A. F. in “Chemistry and Biochemistry of Amino Acids, Peptides, and Proteins,” B. Weinstein, eds., Marcel Dekker, New York, p. 267 (1983); Szatola, A. F., Vega Data (March 1983), Vol. 1, Issue 3, “Peptide Backbone Modifications” (general review); Morley, J. S., Trends Pharm Sci (1980) pp. 463-468 (general review); Hudson, D. et al., Int J Pent Prot Res (1979) 14: 177-185; Spatola, A. F. et al., Life Sci (1986) 38: 1243-1249; Hann, M. M., J Chem Soc Perkin Trans I (1982) 307-314; Almquist, R. G. et al., J Med Chem (1980) 23: 1392-1398; Jennings-White, C. et al., Tetrahedron Lett (1982) 23: 2533; Szelke, M. et al., EP 45665 (1982) CA: 97: 39405 (1982); Holladay, M. W. et al., Tetrahedron Lett (1983) 24: 4401-4404; and Hruby, V. J., Life Sci (1982) 31: 189-199. A particularly preferred non-peptide linkage is —CH₂NH—. Such peptide mimetics may have significant advantages over peptide embodiments, including, for example: more economical production, greater chemical stability, enhanced pharmacological properties (half-life, absorption, potency, efficacy, etc.), and others.

[0083] Peptidomimetics also include “reversed” or “retro” amino acid sequences. Reversed or retro amino acid sequences comprise covalently-bonded amino acid residues wherein the normal carboxyl-to-amino direction of peptide bond formation in the amino acid backbone is reversed such that, reading in the conventional left-to-right direction, the amino portion of the peptide bond precedes (rather than follows) the carbonyl portion. See, generally, Goodman, M. and Chorev, M. Accounts of Chem. Res. 1979, 12, 423.

[0084] The reversed orientation peptides include (a) those wherein one or more amino-terminal residues are converted to a reversed (“rev”) orientation (thus yielding a second “carboxyl terminus” at the left-most portion of the molecule), and (b) those wherein one or more carboxyl-terminal residues are converted to a reversed (“rev”) orientation (yielding a second “amino terminus” at the right-most portion of the molecule). A peptide (amide) bond cannot be formed at the interface between a normal orientation residue and a reverse orientation residue.

[0085] Therefore, certain reversed amino acid sequences of the invention can be formed by utilizing an appropriate amino acid mimetic moiety to link the two adjacent portions of the sequences utilizing a reversed peptide (reversed amide) bond. In case (a) above, a central residue of a diketo compound may conveniently be utilized to link structures with two amide bonds to achieve a peptidomimetic structure. In case (b) above, a central residue of a diamino compound will likewise be useful to link structures with two amide bonds to form a peptidomimetic structure.

[0086] The reversed direction of bonding in such compounds will generally, in addition, require inversion of the enantiomeric configuration of the reversed amino acid residues in order to maintain a spatial orientation of side chains that is similar to that of the non-reversed amino acid. The configuration of amino acids in the reversed portion of the peptides is preferably (D), and the configuration of the non-reversed portion is preferably (L). Opposite or mixed configurations are acceptable when appropriate to optimize a binding activity.

[0087] The amino acid sequence or peptidomimetic comprised by the amyloid β peptide analogues of the invention is characterized by a particular secondary structure comprising a loop (synonym: turn). A loop (or turn) as used herein is meant to define the close approach (usually <7 Å) of at least two Cα atoms.

[0088] Suitable loops include α-, β-, γ-, and π-loops. According to a particular embodiment of the invention, the loop is a β-loop. A β-loop as used herein is meant to define a loop which is characterized by hydrogen bond(s) in which the donor and acceptor residues are separated by three residues i→i+/−3H-bonding).

[0089] According to a particular embodiment of the invention, the loop is a β-hairpin loop. A β-hairpin loop as used herein is meant to define a loop, in which the direction of the peptide or peptidomimetic backbone reverses and the flanking secondary structure elements interact.

[0090] According to a further particular embodiment of the invention, the amyloid β peptide analogues comprise an amino acid sequence which forms an intra-molecular antiparallel β-sheet. An antiparallel β-sheet as used herein is meant to define an assembly of at least two β-strands connected laterally by three or more hydrogen bonds, forming a generally twisted, pleated sheet. A β-strand is a stretch of amino acids comprising typically 3-10 amino acids whose peptide backbones are almost fully extended, or a peptidomimetic thereof.

[0091] According to a particular embodiment, the amyloid β peptide analogues of the invention comprise an amino acid sequence in which the β-strands forming the antiparallel β-sheet are connected via the loop, preferably the β-hairpin loop as defined herein.

[0092] The amino acid sequence of the amyloid β peptide analogues of the invention has at least 66% identity to the amino acid sequence of native human Aβ peptide or a portion thereof.

[0093] The term “native human Aβ peptide” as used herein refers to a naturally-occurring Aβ(X-Y) peptide of human origin, such as Aβ(1-40) or Aβ(1-42) peptide.

[0094] The term “naturally-occurring Aβ(X-Y) peptide” here refers to the amino acid sequence from amino acid position X to amino acid position Y of the human amyloid β protein including both X and Y, in particular to the amino acid sequence from amino acid position X to amino acid position Y of the amino acid sequence DAEFRHDSGY EVHHQKLVFF AEDVGSNKGA IIGLMVGGVV IAT (corresponding to amino acid positions 1 to 43; the human query sequence) or any of its naturally occurring variants, in particular those with at least one mutation selected from the group consisting of A2T, H6R, D7N, A21G (“Flemish”), E22G (“Arctic”), E22Q (“Dutch”), E22K (“Italian”), D23N (“Iowa”), A42T and A42V wherein the numbers are relative to the start of the Aβ peptide, including both position X and position Y.

[0095] For instance, the term “naturally-occurring Aβ(1-42) peptide” here refers to the amino acid sequence from amino acid position 1 to amino acid position 42 of the human amyloid β protein including both 1 and 42, in particular to the amino acid sequence [sequence omitted] or any of its naturally occurring variants, in particular those with at least one mutation selected from the group consisting of A21 G (“Flemish”), E22G (“Arctic”), E22Q (“Dutch”), E22K (“Italian”), D23N (“Iowa”), A42T and A42V wherein the numbers are relative to the start of the Aβ peptide, including both 1 and 42.

[0096] Thus the amyloid β peptide analogues of the invention comprise an amino acid sequence which corresponds to naturally occurring Aβ peptides, functional fragments and variant sequences thereof that are at least about 66%, 70%, 75%, 80%, 85%, 90%, 95%, 97%, 99% or more identical to the human query sequence described above or a portion thereof.

[0097] The term “corresponds to” is used herein to mean that an amino acid sequence is homologous (i.e., is identical, not strictly evolutionarily related) to all or a portion of a reference amino acid sequence.

[0098] The following terms are used to describe the sequence relationships between two or more polynucleotide or amino acid sequences: “reference sequence”, “comparison window”, “sequence identity”, and “percentage of sequence identity”. A “reference sequence” or “query sequence” is a defined sequence used as a basis for a sequence comparison; a reference sequence may be a subset of a larger sequence, for example, as a portion of a full-length cDNA, gene sequence or polypeptide sequence, or may comprise a complete cDNA, gene sequence or polypeptide sequence, such as a human Aβ peptide sequence described above. Since two sequences may each (1) comprise a sequence (i.e., a portion of the complete sequence) that is similar between the two sequences, and (2) may further comprise a sequence that is divergent between the two sequences, sequence comparisons between two (or more) polynucleotides are typically performed by comparing sequences of the two sequences over a “comparison window” to identify and compare local regions of sequence similarity. A “comparison window”, as used herein, refers to a conceptual segment of at least 6 contiguous amino acid or 24 nucleotide positions wherein a sequence may be compared to a reference sequence of at least 6, 8, 10, 12, 14, 16, 18, 20, 22, 24, 26, 28, 30, 32, 34, 36, 38, 40, or 42 contiguous amino acids or 18, 24, 30, 36, 42, 48, 54, 60, 66, 72, 78, 84, 90, 96, 102, 108, 114, 120, or 126 nucleotides and wherein the portion of the sequence in the comparison window may comprise additions or deletions (i.e., gaps) of 20 percent or less as compared to the reference sequence (which does not comprise additions or deletions) for optimal alignment of the two sequences. In the context of optimal alignment of sequences for aligning a comparison window may be conducted by the local homology algorithm of Smith and Waterman (1981) Adv. Appl. Math. 2: 482, by the homology alignment algorithm of Needleman and Wunsch (1970) J. Mol. Biol. 48: 443, by the search for similarity method of Pearson and Lipman (1988) Proc. Natl. Acad. Sci. (U.S.A.) 85: 2444, by computerized implementations of these algorithms (GAP, BESTFIT, FASTA, and TFASTA in the Wisconsin Genetics Software Package Release 7.0, Genetics Computer Group, 575 Science Dr., Madison, Wis.) or by inspection, and the best alignment (i.e., resulting in the highest percentage of homology over the comparison window) generated by the various methods is selected. The term “sequence identity” means that two sequences are identical (i.e., on a nucleotide-by-nucleotide or amino acid-by-amino acid basis) over the window of comparison. The term “percentage of sequence identity” is calculated by comparing two optimally aligned sequences over the window of comparison, determining the number of positions at which the identical nucleic acid base or amino acid occurs in both sequences to yield the number of matched positions, dividing the number of matched positions by the total number of positions in the window of comparison (i.e., the window size), and multiplying the result by 100 to yield the percentage of sequence identity.

[0099] If the identity of the amino acid sequence of the amyloid β peptide analogue to the amino acid sequence of native human Aβ peptide is to be determined, the window of comparison may include the entire amino acid sequence comprised by the amyloid β peptide analogue or a portion thereof. If the amino acid sequence comprised by the amyloid β peptide analogue is shorter than the amino acid sequence of native human Aβ peptide, the window of comparison will include only a portion of the native human Aβ peptide so that the percentage of sequence identity refers to that portion only. If the amino acid sequence comprised by the amyloid β peptide analogue is longer than the amino acid sequence of native human Aβ peptide, the window of comparison will include only a portion of the amino acid sequence comprised by the amyloid β peptide analogue so that the percentage of sequence identity refers to that portion only.

[0100] According to a particular embodiment, the invention relates to amyloid β peptide analogues wherein the amino acid sequence of the amyloid β peptide analogues has at least 66% identity to a native human Aβ(X-Y) sequence, X being selected from the group consisting of the numbers 1 . . . 23, e.g. 15, 18, 19, 20, 21, 22, or 23, and Y being selected from the group consisting of the numbers 28 . . . 43, e.g. 28, 29, 30, 31, 34, 37, 40, 42, or 43.

[0101] As used herein, the ellipsis A . . . B denotes the set comprising all natural numbers from A to B, including both, e.g. “17 . . . 20” thus denotes the group of the numbers 17, 18, 19 and 20. The hyphen denotes a contiguous sequence of amino acids, i.e., “X-Y” comprises the sequence from amino acid X to amino acid Y, including both. Thus, “A . . . B-C . . . D” comprises all possible combinations between members of these two sets, e.g. “17 . . . 20-40 . . . 42” comprises all of the following: 17-40, 17-41, 17-42, 18-40, 18-41, 18-42, 19-40, 19-41, 19-42, 20-40, 20-41 and 20-42. Unless stated otherwise, all numbers refer to the beginning of the mature peptide, 1 indicating the N-terminal amino acid.

[0102] In particular, the amino acid sequence of the amyloid β peptide analogues has at least 66% identity to a sequence selected from the group consisting of SEQ ID NO:1-368:

| | SEQ |
|---|---|
| | ID |
| Sequence | NO |
| DAEFRHDSGYEVHHQKLVFFAEDVGSNKGAIIGLMVGGVVIAT- | 1 |
| -AEFRHDSGYEVHHQKLVFFAEDVGSNKGAIIGLMVGGVVIAT- | 2 |
| --EFRHDSGYEVHHQKLVFFAEDVGSNKGAIIGLMVGGVVIAT- | 3 |
| ---FRHDSGYEVHHQKLVFFAEDVGSNKGAIIGLMVGGVVIAT- | 4 |
| ----RHDSGYEVHHQKLVFFAEDVGSNKGAIIGLMVGGVVIAT- | 5 |
| -----HDSGYEVHHQKLVFFAEDVGSNKGAIIGLMVGGVVIAT- | 6 |
| ------DSGYEVHHQKLVFFAEDVGSNKGAIIGLMVGGVVIAT- | 7 |
| -------SGYEVHHQKLVFFAEDVGSNKGAIIGLMVGGVVIAT- | 8 |
| --------GYEVHHQKLVFFAEDVGSNKGAIIGLMVGGVVIAT- | 9 |
| ---------YEVHHQKLVFFAEDVGSNKGAIIGLMVGGVVIAT- | 10 |
| ----------EVHHQKLVFFAEDVGSNKGAIIGLMVGGVVIAT- | 11 |
| -----------VHHQKLVFFAEDVGSNKGAIIGLMVGGVVIAT- | 12 |
| ------------HHQKLVFFAEDVGSNKGAIIGLMVGGVVIAT- | 13 |
| -------------HQKLVFFAEDVGSNKGAIIGLMVGGVVIAT- | 14 |
| --------------QKLVFFAEDVGSNKGAIIGLMVGGVVIAT- | 15 |
| ---------------KLVFFAEDVGSNKGAIIGLMVGGVVIAT- | 16 |
| ----------------LVFFAEDVGSNKGAIIGLMVGGVVIAT- | 17 |
| -----------------VFFAEDVGSNKGAIIGLMVGGVVIAT- | 18 |
| ------------------FFAEDVGSNKGAIIGLMVGGVVIAT- | 19 |
| -------------------FAEDVGSNKGAIIGLMVGGVVIAT- | 20 |
| --------------------AEDVGSNKGAIIGLMVGGVVIAT- | 21 |
| ---------------------EDVGSNKGAIIGLMVGGVVIAT- | 22 |
| ----------------------DVGSNKGAIIGLMVGGVVIAT- | 23 |
| [sequence omitted] | 24 |
| -AEFRHDSGYEVHHQKLVFFAEDVGSNKGAIIGLMVGGVVIA-- | 25 |
| --EFRHDSGYEVHHQKLVFFAEDVGSNKGAIIGLMVGGVVIA-- | 26 |
| ---FRHDSGYEVHHQKLVFFAEDVGSNKGAIIGLMVGGVVIA-- | 27 |
| ----RHDSGYEVHHQKLVFFAEDVGSNKGAIIGLMVGGVVIA-- | 28 |
| -----HDSGYEVHHQKLVFFAEDVGSNKGAIIGLMVGGVVIA-- | 29 |
| ------DSGYEVHHQKLVFFAEDVGSNKGAIIGLMVGGVVIA-- | 30 |
| -------SGYEVHHQKLVFFAEDVGSNKGAIIGLMVGGVVIA-- | 31 |
| --------GYEVHHQKLVFFAEDVGSNKGAIIGLMVGGVVIA-- | 32 |
| ---------YEVHHQKLVFFAEDVGSNKGAIIGLMVGGVVIA-- | 33 |
| ----------EVHHQKLVFFAEDVGSNKGAIIGLMVGGVVIA-- | 34 |
| -----------VHHQKLVFFAEDVGSNKGAIIGLMVGGVVIA-- | 35 |
| ------------HHQKLVFFAEDVGSNKGAIIGLMVGGVVIA-- | 36 |
| -------------HQKLVFFAEDVGSNKGAIIGLMVGGVVIA-- | 37 |
| --------------QKLVFFAEDVGSNKGAIIGLMVGGVVIA-- | 38 |
| ---------------KLVFFAEDVGSNKGAIIGLMVGGVVIA-- | 39 |
| ----------------LVFFAEDVGSNKGAIIGLMVGGVVIA-- | 40 |
| -----------------VFFAEDVGSNKGAIIGLMVGGVVIA-- | 41 |
| ------------------FFAEDVGSNKGAIIGLMVGGVVIA-- | 42 |
| -------------------FAEDVGSNKGAIIGLMVGGVVIA-- | 43 |
| --------------------AEDVGSNKGAIIGLMVGGVVIA-- | 44 |
| ---------------------EDVGSNKGAIIGLMVGGVVIA-- | 45 |
| ----------------------DVGSNKGAIIGLMVGGVVIA-- | 46 |
| DAEFRHDSGYEVHHQKLVFFAEDVGSNKGAIIGLMVGGVVI--- | 47 |
| -AEFRHDSGYEVHHQKLVFFAEDVGSNKGAIIGLMVGGVVI--- | 48 |
| --EFRHDSGYEVHHQKLVFFAEDVGSNKGAIIGLMVGGVVI--- | 49 |
| ---FRHDSGYEVHHQKLVFFAEDVGSNKGAIIGLMVGGVVI--- | 50 |
| ----RHDSGYEVHHQKLVFFAEDVGSNKGAIIGLMVGGVVI--- | 51 |
| -----HDSGYEVHHQKLVFFAEDVGSNKGAIIGLMVGGVVI--- | 52 |
| ------DSGYEVHHQKLVFFAEDVGSNKGAIIGLMVGGVVI--- | 53 |
| -------SGYEVHHQKLVFFAEDVGSNKGAIIGLMVGGVVI--- | 54 |
| --------GYEVHHQKLVFFAEDVGSNKGAIIGLMVGGVVI--- | 55 |
| ---------YEVHHQKLVFFAEDVGSNKGAIIGLMVGGVVI--- | 56 |
| ----------EVHHQKLVFFAEDVGSNKGAIIGLMVGGVVI--- | 57 |
| -----------VHHQKLVFFAEDVGSNKGAIIGLMVGGVVI--- | 58 |
| ------------HHQKLVFFAEDVGSNKGAIIGLMVGGVVI--- | 59 |
| -------------HQKLVFFAEDVGSNKGAIIGLMVGGVVI--- | 60 |
| --------------QKLVFFAEDVGSNKGAIIGLMVGGVVI--- | 61 |
| ---------------KLVFFAEDVGSNKGAIIGLMVGGVVI--- | 62 |
| ----------------LVFFAEDVGSNKGAIIGLMVGGVVI--- | 63 |
| -----------------VFFAEDVGSNKGAIIGLMVGGVVI--- | 64 |
| ------------------FFAEDVGSNKGAIIGLMVGGVVI--- | 65 |
| -------------------FAEDVGSNKGAIIGLMVGGVVI--- | 66 |
| --------------------AEDVGSNKGAIIGLMVGGVVI--- | 67 |
| ---------------------EDVGSNKGAIIGLMVGGVVI--- | 68 |
| ----------------------DVGSNKGAIIGLMVGGVVI--- | 69 |
| DAEFRHDSGYEVHHQKLVFFAEDVGSNKGAIIGLMVGGVV---- | 70 |
| -AEFRHDSGYEVHHQKLVFFAEDVGSNKGAIIGLMVGGVV---- | 71 |
| --EFRHDSGYEVHHQKLVFFAEDVGSNKGAIIGLMVGGVV---- | 72 |
| ---FRHDSGYEVHHQKLVFFAEDVGSNKGAIIGLMVGGVV---- | 73 |
| ----RHDSGYEVHHQKLVFFAEDVGSNKGAIIGLMVGGVV---- | 74 |
| -----HDSGYEVHHQKLVFFAEDVGSNKGAIIGLMVGGVV---- | 75 |
| ------DSGYEVHHQKLVFFAEDVGSNKGAIIGLMVGGVV---- | 76 |
| -------SGYEVHHQKLVFFAEDVGSNKGAIIGLMVGGVV---- | 77 |
| --------GYEVHHQKLVFFAEDVGSNKGAIIGLMVGGVV---- | 78 |
| ---------YEVHHQKLVFFAEDVGSNKGAIIGLMVGGVV---- | 79 |
| ----------EVHHQKLVFFAEDVGSNKGAIIGLMVGGVV---- | 80 |
| -----------VHHQKLVFFAEDVGSNKGAIIGLMVGGVV---- | 81 |
| ------------HHQKLVFFAEDVGSNKGAIIGLMVGGVV---- | 82 |
| -------------HQKLVFFAEDVGSNKGAIIGLMVGGVV---- | 83 |
| --------------QKLVFFAEDVGSNKGAIIGLMVGGVV---- | 84 |
| ---------------KLVFFAEDVGSNKGAIIGLMVGGVV---- | 85 |
| ----------------LVFFAEDVGSNKGAIIGLMVGGVV---- | 86 |
| -----------------VFFAEDVGSNKGAIIGLMVGGVV---- | 87 |
| ------------------FFAEDVGSNKGAIIGLMVGGVV---- | 88 |
| -------------------FAEDVGSNKGAIIGLMVGGVV---- | 89 |
| --------------------AEDVGSNKGAIIGLMVGGVV---- | 90 |
| ---------------------EDVGSNKGAIIGLMVGGVV---- | 91 |
| ----------------------DVGSNKGAIIGLMVGGVV---- | 92 |
| DAEFRHDSGYEVHHQKLVFFAEDVGSNKGAIIGLMVGGV----- | 93 |
| -AEFRHDSGYEVHHQKLVFFAEDVGSNKGAIIGLMVGGV----- | 94 |
| --EFRHDSGYEVHHQKLVFFAEDVGSNKGAIIGLMVGGV----- | 95 |
| ---FRHDSGYEVHHQKLVFFAEDVGSNKGAIIGLMVGGV----- | 96 |
| ----RHDSGYEVHHQKLVFFAEDVGSNKGAIIGLMVGGV----- | 97 |
| -----HDSGYEVHHQKLVFFAEDVGSNKGAIIGLMVGGV----- | 98 |
| ------DSGYEVHHQKLVFFAEDVGSNKGAIIGLMVGGV----- | 99 |
| -------SGYEVHHQKLVFFAEDVGSNKGAIIGLMVGGV----- | 100 |
| --------GYEVHHQKLVFFAEDVGSNKGAIIGLMVGGV----- | 101 |
| ---------YEVHHQKLVFFAEDVGSNKGAIIGLMVGGV----- | 102 |
| ----------EVHHQKLVFFAEDVGSNKGAIIGLMVGGV----- | 103 |
| -----------VHHQKLVFFAEDVGSNKGAIIGLMVGGV----- | 104 |
| ------------HHQKLVFFAEDVGSNKGAIIGLMVGGV----- | 105 |
| -------------HQKLVFFAEDVGSNKGAIIGLMVGGV----- | 106 |
| --------------QKLVFFAEDVGSNKGAIIGLMVGGV----- | 107 |
| ---------------KLVFFAEDVGSNKGAIIGLMVGGV----- | 108 |
| ----------------LVFFAEDVGSNKGAIIGLMVGGV----- | 109 |
| -----------------VFFAEDVGSNKGAIIGLMVGGV----- | 110 |
| ------------------FFAEDVGSNKGAIIGLMVGGV----- | 111 |
| -------------------FAEDVGSNKGAIIGLMVGGV----- | 112 |
| --------------------AEDVGSNKGAIIGLMVGGV----- | 113 |
| ---------------------EDVGSNKGAIIGLMVGGV----- | 114 |
| ----------------------DVGSNKGAIIGLMVGGV----- | 115 |
| DAEFRHDSGYEVHHQKLVFFAEDVGSNKGAIIGLMVGG------ | 116 |
| -AEFRHDSGYEVHHQKLVFFAEDVGSNKGAIIGLMVGG------ | 117 |
| --EFRHDSGYEVHHQKLVFFAEDVGSNKGAIIGLMVGG------ | 118 |
| ---FRHDSGYEVHHQKLVFFAEDVGSNKGAIIGLMVGG------ | 119 |
| ----RHDSGYEVHHQKLVFFAEDVGSNKGAIIGLMVGG------ | 120 |
| -----HDSGYEVHHQKLVFFAEDVGSNKGAIIGLMVGG------ | 121 |
| ------DSGYEVHHQKLVFFAEDVGSNKGAIIGLMVGG------ | 122 |
| -------SGYEVHHQKLVFFAEDVGSNKGAIIGLMVGG------ | 123 |
| --------GYEVHHQKLVFFAEDVGSNKGAIIGLMVGG------ | 124 |
| ---------YEVHHQKLVFFAEDVGSNKGAIIGLMVGG------ | 125 |
| ----------EVHHQKLVFFAEDVGSNKGAIIGLMVGG------ | 126 |
| -----------VHHQKLVFFAEDVGSNKGAIIGLMVGG------ | 127 |
| ------------HHQKLVFFAEDVGSNKGAIIGLMVGG------ | 128 |
| -------------HQKLVFFAEDVGSNKGAIIGLMVGG------ | 129 |
| --------------QKLVFFAEDVGSNKGAIIGLMVGG------ | 130 |
| ---------------KLVFFAEDVGSNKGAIIGLMVGG------ | 131 |
| ----------------LVFFAEDVGSNKGAIIGLMVGG------ | 132 |
| -----------------VFFAEDVGSNKGAIIGLMVGG------ | 133 |
| ------------------FFAEDVGSNKGAIIGLMVGG------ | 134 |
| -------------------FAEDVGSNKGAIIGLMVGG------ | 135 |
| --------------------AEDVGSNKGAIIGLMVGG------ | 136 |
| ---------------------EDVGSNKGAIIGLMVGG------ | 137 |
| ----------------------DVGSNKGAIIGLMVGG------ | 138 |
| DAEFRHDSGYEVHHQKLVFFAEDVGSNKGAIIGLMVG------- | 139 |
| -AEFRHDSGYEVHHQKLVFFAEDVGSNKGAIIGLMVG------- | 140 |
| --EFRHDSGYEVHHQKLVFFAEDVGSNKGAIIGLMVG------- | 141 |
| ---FRHDSGYEVHHQKLVFFAEDVGSNKGAIIGLMVG------- | 142 |
| ----RHDSGYEVHHQKLVFFAEDVGSNKGAIIGLMVG------- | 143 |
| -----HDSGYEVHHQKLVFFAEDVGSNKGAIIGLMVG------- | 144 |
| ------DSGYEVHHQKLVFFAEDVGSNKGAIIGLMVG------- | 145 |
| -------SGYEVHHQKLVFFAEDVGSNKGAIIGLMVG------- | 146 |
| --------GYEVHHQKLVFFAEDVGSNKGAIIGLMVG------- | 147 |
| ---------YEVHHQKLVFFAEDVGSNKGAIIGLMVG------- | 148 |
| ----------EVHHQKLVFFAEDVGSNKGAIIGLMVG------- | 149 |
| -----------VHHQKLVFFAEDVGSNKGAIIGLMVG------- | 150 |
| ------------HHQKLVFFAEDVGSNKGAIIGLMVG------- | 151 |
| -------------HQKLVFFAEDVGSNKGAIIGLMVG------- | 152 |
| --------------QKLVFFAEDVGSNKGAIIGLMVG------- | 153 |
| ---------------KLVFFAEDVGSNKGAIIGLMVG------- | 154 |
| ----------------LVFFAEDVGSNKGAIIGLMVG------- | 155 |
| -----------------VFFAEDVGSNKGAIIGLMVG------- | 156 |
| ------------------FFAEDVGSNKGAIIGLMVG------- | 157 |
| -------------------FAEDVGSNKGAIIGLMVG------- | 158 |
| --------------------AEDVGSNKGAIIGLMVG------- | 159 |
| ---------------------EDVGSNKGAIIGLMVG------- | 160 |
| ----------------------DVGSNKGAIIGLMVG------- | 161 |
| DAEFRHDSGYEVHHQKLVFFAEDVGSNKGAIIGLMV-------- | 162 |
| -AEFRHDSGYEVHHQKLVFFAEDVGSNKGAIIGLMV-------- | 163 |
| --EFRHDSGYEVHHQKLVFFAEDVGSNKGAIIGLMV-------- | 164 |
| ---FRHDSGYEVHHQKLVFFAEDVGSNKGAIIGLMV-------- | 165 |
| ----RHDSGYEVHHQKLVFFAEDVGSNKGAIIGLMV-------- | 166 |
| -----HDSGYEVHHQKLVFFAEDVGSNKGAIIGLMV-------- | 167 |
| ------DSGYEVHHQKLVFFAEDVGSNKGAIIGLMV-------- | 168 |
| -------SGYEVHHQKLVFFAEDVGSNKGAIIGLMV-------- | 169 |
| --------GYEVHHQKLVFFAEDVGSNKGAIIGLMV-------- | 170 |
| ---------YEVHHQKLVFFAEDVGSNKGAIIGLMV-------- | 171 |
| ----------EVHHQKLVFFAEDVGSNKGAIIGLMV-------- | 172 |
| -----------VHHQKLVFFAEDVGSNKGAIIGLMV-------- | 173 |
| ------------HHQKLVFFAEDVGSNKGAIIGLMV-------- | 174 |
| -------------HQKLVFFAEDVGSNKGAIIGLMV-------- | 175 |
| --------------QKLVFFAEDVGSNKGAIIGLMV-------- | 176 |
| ---------------KLVFFAEDVGSNKGAIIGLMV-------- | 177 |
| ----------------LVFFAEDVGSNKGAIIGLMV-------- | 178 |
| -----------------VFFAEDVGSNKGAIIGLMV-------- | 179 |
| ------------------FFAEDVGSNKGAIIGLMV-------- | 180 |
| -------------------FAEDVGSNKGAIIGLMV-------- | 181 |
| --------------------AEDVGSNKGAIIGLMV-------- | 182 |
| ---------------------EDVGSNKGAIIGLMV-------- | 183 |
| ----------------------DVGSNKGAIIGLMV-------- | 184 |
| DAEFRHDSGYEVHHQKLVFFAEDVGSNKGAIIGLM--------- | 185 |
| -AEFRHDSGYEVHHQKLVFFAEDVGSNKGAIIGLM--------- | 186 |
| --EFRHDSGYEVHHQKLVFFAEDVGSNKGAIIGLM--------- | 187 |
| ---FRHDSGYEVHHQKLVFFAEDVGSNKGAIIGLM--------- | 188 |
| ----RHDSGYEVHHQKLVFFAEDVGSNKGAIIGLM--------- | 189 |
| -----HDSGYEVHHQKLVFFAEDVGSNKGAIIGLM--------- | 190 |
| ------DSGYEVHHQKLVFFAEDVGSNKGAIIGLM--------- | 191 |
| -------SGYEVHHQKLVFFAEDVGSNKGAIIGLM--------- | 192 |
| --------GYEVHHQKLVFFAEDVGSNKGAIIGLM--------- | 193 |
| ---------YEVHHQKLVFFAEDVGSNKGAIIGLM--------- | 194 |
| ----------EVHHQKLVFFAEDVGSNKGAIIGLM--------- | 195 |
| -----------VHHQKLVFFAEDVGSNKGAIIGLM--------- | 196 |
| ------------HHQKLVFFAEDVGSNKGAIIGLM--------- | 197 |
| -------------HQKLVFFAEDVGSNKGAIIGLM--------- | 198 |
| --------------QKLVFFAEDVGSNKGAIIGLM--------- | 199 |
| ---------------KLVFFAEDVGSNKGAIIGLM--------- | 200 |
| ----------------LVFFAEDVGSNKGAIIGLM--------- | 201 |
| -----------------VFFAEDVGSNKGAIIGLM--------- | 202 |
| ------------------FFAEDVGSNKGAIIGLM--------- | 203 |
| -------------------FAEDVGSNKGAIIGLM--------- | 204 |
| --------------------AEDVGSNKGAIIGLM--------- | 205 |
| ---------------------EDVGSNKGAIIGLM--------- | 206 |
| ----------------------DVGSNKGAIIGLM--------- | 207 |
| DAEFRHDSGYEVHHQKLVFFAEDVGSNKGAIIGL---------- | 208 |
| -AEFRHDSGYEVHHQKLVFFAEDVGSNKGAIIGL---------- | 209 |
| --EFRHDSGYEVHHQKLVFFAEDVGSNKGAIIGL---------- | 210 |
| ---FRHDSGYEVHHQKLVFFAEDVGSNKGAIIGL---------- | 211 |
| ----RHDSGYEVHHQKLVFFAEDVGSNKGAIIGL---------- | 212 |
| -----HDSGYEVHHQKLVFFAEDVGSNKGAIIGL---------- | 213 |
| ------DSGYEVHHQKLVFFAEDVGSNKGAIIGL---------- | 214 |
| -------SGYEVHHQKLVFFAEDVGSNKGAIIGL---------- | 215 |
| --------GYEVHHQKLVFFAEDVGSNKGAIIGL---------- | 216 |
| ---------YEVHHQKLVFFAEDVGSNKGAIIGL---------- | 217 |
| ----------EVHHQKLVFFAEDVGSNKGAIIGL---------- | 218 |
| -----------VHHQKLVFFAEDVGSNKGAIIGL---------- | 219 |
| ------------HHQKLVFFAEDVGSNKGAIIGL---------- | 220 |
| -------------HQKLVFFAEDVGSNKGAIIGL---------- | 221 |
| --------------QKLVFFAEDVGSNKGAIIGL---------- | 222 |
| ---------------KLVFFAEDVGSNKGAIIGL---------- | 223 |
| ----------------LVFFAEDVGSNKGAIIGL---------- | 224 |
| -----------------VFFAEDVGSNKGAIIGL---------- | 225 |
| ------------------FFAEDVGSNKGAIIGL---------- | 226 |
| -------------------FAEDVGSNKGAIIGL---------- | 227 |
| --------------------AEDVGSNKGAIIGL---------- | 228 |
| ---------------------EDVGSNKGAIIGL---------- | 229 |
| ----------------------DVGSNKGAIIGL---------- | 230 |
| DAEFRHDSGYEVHHQKLVFFAEDVGSNKGAIIG----------- | 231 |
| -AEFRHDSGYEVHHQKLVFFAEDVGSNKGAIIG----------- | 232 |
| --EFRHDSGYEVHHQKLVFFAEDVGSNKGAIIG----------- | 233 |
| ---FRHDSGYEVHHQKLVFFAEDVGSNKGAIIG----------- | 234 |
| ----RHDSGYEVHHQKLVFFAEDVGSNKGAIIG----------- | 235 |
| -----HDSGYEVHHQKLVFFAEDVGSNKGAIIG----------- | 236 |
| ------DSGYEVHHQKLVFFAEDVGSNKGAIIG----------- | 237 |
| -------SGYEVHHQKLVFFAEDVGSNKGAIIG----------- | 238 |
| --------GYEVHHQKLVFFAEDVGSNKGAIIG----------- | 239 |
| ---------YEVHHQKLVFFAEDVGSNKGAIIG----------- | 240 |
| ----------EVHHQKLVFFAEDVGSNKGAIIG----------- | 241 |
| -----------VHHQKLVFFAEDVGSNKGAIIG----------- | 242 |
| ------------HHQKLVFFAEDVGSNKGAIIG----------- | 243 |
| -------------HQKLVFFAEDVGSNKGAIIG----------- | 244 |
| --------------QKLVFFAEDVGSNKGAIIG----------- | 245 |
| ---------------KLVFFAEDVGSNKGAIIG----------- | 246 |
| ----------------LVFFAEDVGSNKGAIIG----------- | 247 |
| -----------------VFFAEDVGSNKGAIIG----------- | 248 |
| ------------------FFAEDVGSNKGAIIG----------- | 249 |
| -------------------FAEDVGSNKGAIIG----------- | 250 |
| --------------------AEDVGSNKGAIIG----------- | 251 |
| ---------------------EDVGSNKGAIIG----------- | 252 |
| ----------------------DVGSNKGAIIG----------- | 253 |
| DAEFRHDSGYEVHHQKLVFFAEDVGSNKGAII------------ | 254 |
| -AEFRHDSGYEVHHQKLVFFAEDVGSNKGAII------------ | 255 |
| --EFRHDSGYEVHHQKLVFFAEDVGSNKGAII------------ | 256 |
| ---FRHDSGYEVHHQKLVFFAEDVGSNKGAII------------ | 257 |
| ----RHDSGYEVHHQKLVFFAEDVGSNKGAII------------ | 258 |
| -----HDSGYEVHHQKLVFFAEDVGSNKGAII------------ | 259 |
| ------DSGYEVHHQKLVFFAEDVGSNKGAII------------ | 260 |
| -------SGYEVHHQKLVFFAEDVGSNKGAII------------ | 261 |
| --------GYEVHHQKLVFFAEDVGSNKGAII------------ | 262 |
| ---------YEVHHQKLVFFAEDVGSNKGAII------------ | 263 |
| ----------EVHHQKLVFFAEDVGSNKGAII------------ | 264 |
| -----------VHHQKLVFFAEDVGSNKGAII------------ | 265 |
| ------------HHQKLVFFAEDVGSNKGAII------------ | 266 |
| -------------HQKLVFFAEDVGSNKGAII------------ | 267 |
| --------------QKLVFFAEDVGSNKGAII------------ | 268 |
| ---------------KLVFFAEDVGSNKGAII------------ | 269 |
| ----------------LVFFAEDVGSNKGAII------------ | 270 |
| -----------------VFFAEDVGSNKGAII------------ | 271 |
| ------------------FFAEDVGSNKGAII------------ | 272 |
| -------------------FAEDVGSNKGAII------------ | 273 |
| --------------------AEDVGSNKGAII------------ | 274 |
| ---------------------EDVGSNKGAII------------ | 275 |
| ----------------------DVGSNKGAII------------ | 276 |
| DAEFRHDSGYEVHHQKLVFFAEDVGSNKGAI------------- | 277 |
| -AEFRHDSGYEVHHQKLVFFAEDVGSNKGAI------------- | 278 |
| --EFRHDSGYEVHHQKLVFFAEDVGSNKGAI------------- | 279 |
| ---FRHDSGYEVHHQKLVFFAEDVGSNKGAI------------- | 280 |
| ----RHDSGYEVHHQKLVFFAEDVGSNKGAI------------- | 281 |
| -----HDSGYEVHHQKLVFFAEDVGSNKGAI------------- | 282 |
| ------DSGYEVHHQKLVFFAEDVGSNKGAI------------- | 283 |
| -------SGYEVHHQKLVFFAEDVGSNKGAI------------- | 284 |
| --------GYEVHHQKLVFFAEDVGSNKGAI------------- | 285 |
| ---------YEVHHQKLVFFAEDVGSNKGAI------------- | 286 |
| ----------EVHHQKLVFFAEDVGSNKGAI------------- | 287 |
| -----------VHHQKLVFFAEDVGSNKGAI------------- | 288 |
| ------------HHQKLVFFAEDVGSNKGAI------------- | 289 |
| -------------HQKLVFFAEDVGSNKGAI------------- | 290 |
| --------------QKLVFFAEDVGSNKGAI------------- | 291 |
| ---------------KLVFFAEDVGSNKGAI------------- | 292 |
| ----------------LVFFAEDVGSNKGAI------------- | 293 |
| -----------------VFFAEDVGSNKGAI------------- | 294 |
| ------------------FFAEDVGSNKGAI------------- | 295 |
| -------------------FAEDVGSNKGAI------------- | 296 |
| --------------------AEDVGSNKGAI------------- | 297 |
| ---------------------EDVGSNKGAI------------- | 298 |
| ----------------------DVGSNKGAI------------- | 299 |
| DAEFRHDSGYEVHHQKLVFFAEDVGSNKGA-------------- | 300 |
| -AEFRHDSGYEVHHQKLVFFAEDVGSNKGA-------------- | 301 |
| --EFRHDSGYEVHHQKLVFFAEDVGSNKGA-------------- | 302 |
| ---FRHDSGYEVHHQKLVFFAEDVGSNKGA-------------- | 303 |
| ----RHDSGYEVHHQKLVFFAEDVGSNKGA-------------- | 304 |
| -----HDSGYEVHHQKLVFFAEDVGSNKGA-------------- | 305 |
| ------DSGYEVHHQKLVFFAEDVGSNKGA-------------- | 306 |
| -------SGYEVHHQKLVFFAEDVGSNKGA-------------- | 307 |
| --------GYEVHHQKLVFFAEDVGSNKGA-------------- | 308 |
| ---------YEVHHQKLVFFAEDVGSNKGA-------------- | 309 |
| ----------EVHHQKLVFFAEDVGSNKGA-------------- | 310 |
| -----------VHHQKLVFFAEDVGSNKGA-------------- | 311 |
| ------------HHQKLVFFAEDVGSNKGA-------------- | 312 |
| -------------HQKLVFFAEDVGSNKGA-------------- | 313 |
| --------------QKLVFFAEDVGSNKGA-------------- | 314 |
| ---------------KLVFFAEDVGSNKGA-------------- | 315 |
| ----------------LVFFAEDVGSNKGA-------------- | 316 |
| -----------------VFFAEDVGSNKGA-------------- | 317 |
| ------------------FFAEDVGSNKGA-------------- | 318 |
| -------------------FAEDVGSNKGA-------------- | 319 |
| --------------------AEDVGSNKGA-------------- | 320 |
| ---------------------EDVGSNKGA-------------- | 321 |
| ----------------------DVGSNKGA-------------- | 322 |
| DAEFRHDSGYEVHHQKLVFFAEDVGSNKG--------------- | 323 |
| -AEFRHDSGYEVHHQKLVFFAEDVGSNKG--------------- | 324 |
| --EFRHDSGYEVHHQKLVFFAEDVGSNKG--------------- | 325 |
| ---FRHDSGYEVHHQKLVFFAEDVGSNKG--------------- | 326 |
| ----RHDSGYEVHHQKLVFFAEDVGSNKG--------------- | 327 |
| -----HDSGYEVHHQKLVFFAEDVGSNKG--------------- | 328 |
| ------DSGYEVHHQKLVFFAEDVGSNKG--------------- | 329 |
| -------SGYEVHHQKLVFFAEDVGSNKG--------------- | 330 |
| --------GYEVHHQKLVFFAEDVGSNKG--------------- | 331 |
| ---------YEVHHQKLVFFAEDVGSNKG--------------- | 332 |
| ----------EVHHQKLVFFAEDVGSNKG--------------- | 333 |
| -----------VHHQKLVFFAEDVGSNKG--------------- | 334 |
| ------------HHQKLVFFAEDVGSNKG--------------- | 335 |
| -------------HQKLVFFAEDVGSNKG--------------- | 336 |
| --------------QKLVFFAEDVGSNKG--------------- | 337 |
| ---------------KLVFFAEDVGSNKG--------------- | 338 |
| ----------------LVFFAEDVGSNKG--------------- | 339 |
| -----------------VFFAEDVGSNKG--------------- | 340 |
| ------------------FFAEDVGSNKG--------------- | 341 |
| -------------------FAEDVGSNKG--------------- | 342 |
| --------------------AEDVGSNKG--------------- | 343 |
| ---------------------EDVGSNKG--------------- | 344 |
| ----------------------DVGSNKG--------------- | 345 |
| DAEFRHDSGYEVHHQKLVFFAEDVGSNK---------------- | 346 |
| -AEFRHDSGYEVHHQKLVFFAEDVGSNK---------------- | 347 |
| --EFRHDSGYEVHHQKLVFFAEDVGSNK---------------- | 348 |
| ---FRHDSGYEVHHQKLVFFAEDVGSNK---------------- | 349 |
| ----RHDSGYEVHHQKLVFFAEDVGSNK---------------- | 350 |
| -----HDSGYEVHHQKLVFFAEDVGSNK---------------- | 351 |
| ------DSGYEVHHQKLVFFAEDVGSNK---------------- | 352 |
| -------SGYEVHHQKLVFFAEDVGSNK---------------- | 353 |
| --------GYEVHHQKLVFFAEDVGSNK---------------- | 354 |
| ---------YEVHHQKLVFFAEDVGSNK---------------- | 355 |
| ----------EVHHQKLVFFAEDVGSNK---------------- | 356 |
| -----------VHHQKLVFFAEDVGSNK---------------- | 357 |
| ------------HHQKLVFFAEDVGSNK---------------- | 358 |
| -------------HQKLVFFAEDVGSNK---------------- | 359 |
| --------------QKLVFFAEDVGSNK---------------- | 360 |
| ---------------KLVFFAEDVGSNK---------------- | 361 |
| ----------------LVFFAEDVGSNK---------------- | 362 |
| -----------------VFFAEDVGSNK---------------- | 363 |
| ------------------FFAEDVGSNK---------------- | 364 |
| -------------------FAEDVGSNK---------------- | 365 |
| --------------------AEDVGSNK---------------- | 366 |
| ---------------------EDVGSNK---------------- | 367 |
| ----------------------DVGSNK---------------- | 368 |

[0103] According to a particular embodiment, the amino acid sequence of the amyloid β peptide analogue of the invention corresponds to a sequence selected from the group consisting of SEQ ID NO:1-368 wherein at least one amino acid of the selected sequence is substituted by another amino acid.

[0104] It will be recognized that in certain embodiments of the invention, the amino acid substitutions are conservative, i.e., the replacing amino acid residue has physical and chemical properties that are similar to the amino acid residue being replaced. Especially preferred conservative amino acids substitution groups are: valine-leucine-isoleucine, phenylalanine-tyrosine, lysine-arginine, alanine-valine, and asparagine-glutamine.

[0105] Moreover, systematic substitution of one or more amino acids of the above sequences with a D-amino acid of the same type (e.g., D-lysine in place of L-lysine) may be used to enhance stability.

[0106] It will further be recognized that in certain embodiments of the invention, the amino acid substitutions are non-conservative, i.e., the replacing amino acid residue has physical and chemical properties that differ from those of the amino acid residue being replaced. This embodiment in particular relates to replacing amino acid residues which are capable of forming linkages. That is, such an amino acid substitution enables the formation of a covalent linkage between the replacing amino acid and another amino acid which, in turn, may or may not be a replacing amino acid, too. This allows the introduction of covalent linkages between amino acids at defined positions within the amino acid sequence.

[0107] According to a further particular embodiment, the amino acid sequence of the amyloid β peptide analogues of the invention comprises a sequence selected from the group consisting of SEQ ID NO:1-368, at least two, e.g. two, amino acid residues of said sequence being modified so as to form the required intra-sequence covalent linkage. For instance, each of two amino acids my be replaced by a cysteine. This will allow the formation of a variety of linkages. Particular positions for such amino acid replacements and a variety of appropriate linkages are described herein. Further, one amino acid may be replaced by a cysteine and another amino acid may be replaced by a lysine. This will allow the formation of a variety of linkages. Particular positions for such amino acid replacements and a variety of appropriate linkages are described herein. Further, one amino acid may be replaced by a glutamic acid or aspartic acid and another amino acid may be replaced by a lysine. This will allow the formation of a variety of linkages. Particular positions for such amino acid replacements and a variety of appropriate linkages are described herein.

[0108] The amino acid sequence of the amyloid β peptide analogues of the invention comprises at least 6, preferably at least 8, 10, 12, 14, 16 or 18, contiguous amino acid residues. Further, in a typical embodiment, the amino acid sequence of the amyloid β peptide analogues of the invention will comprise less that 45, 43, 41, 39, 37, or 36 contiguous amino acid residues. According to a preferred embodiment, the contiguous amino acid residues comprise the sequence VGSN, DVGSN, or VGSNK. According to another preferred embodiment, the contiguous amino acid residues comprise the sequence AED. According to still another preferred embodiment, the contiguous amino acid residues comprise both the sequence AED and one of the sequences VGSN, DVGSN, or VGSNK, in particular the sequence AEDVGSN or AEDVGSNK.

[0109] According to a further embodiment of the invention, the amino acid sequence of the amyloid β peptide analogues of the invention comprises the sequence X₁₉X₂₀X₂₁X₂₂X₂₃-VGSN-X₂₈X₂₉X₃₀X₃₁X₃₂, wherein each of X₁₉, X₂₀, X₂₁, X₂₂ X₂₃, X₂₈, X₂₉, X₃₀, X₃₁, X₃₂ independently represents an amino acid, in particular as defined herein. Each of said amino acids may be covalently linked with another amino acid, with the other amino acid being selected among X₁₉, X₂₀ X₂₁, X₂₂ X₂₃, X₂₈, X₂₉, X₃₀, X₃₁, X₃₂, or representing a different amino acid. Preferably, the amino acid sequences X₁₉X₂₀X₂₁ and X₃₀X₃₁X₃₂ are in anti-parallel orientation.

[0110] Particular amyloid β peptide analogues of the invention include those wherein

X₁₉ is an amino acid residue selected from the group consisting of phenylalanine, tyrosine, valine, leucine, isoleucine, and methionine, with phenylalanine being preferred;
X₂₀ is an amino acid residue selected from the group consisting of phenylalanine, tyrosine, valine, leucine, isoleucine, and methionine, with phenylalanine being preferred;
X₂₁ is an amino acid residue selected from the group consisting of alanine, valine, glycine, and serine, with alanine being preferred;
X₂₂ is an amino acid residue selected from the group consisting of glutamic acid and aspartic acid, with glutamic acid being preferred;
X₂₃ is an amino acid residue selected from the group consisting of glutamic acid and aspartic acid, with aspartic acid being preferred;
X₂₈ is an amino acid residue selected from the group consisting of lysine and arginine, with lysine being preferred;
X₂₉ is an amino acid residue selected from the group consisting of glycine, alanine, and serine, with glycine being preferred;
X₃₀ is an amino acid residue selected from the group consisting of alanine, valine, glycine, and serine, with alanine being preferred;
X₃₁ is an amino acid residue selected from the group consisting of isoleucine, leucine, valine, phenylalanine, and methionine, with isoleucine being preferred;
X₃₂ is an amino acid residue selected from the group consisting of isoleucine, leucine, valine, phenylalanine, and methionine, with isoleucine being preferred; or any combination thereof.

[0111] Further particular amyloid β peptide analogues of the invention include those wherein the amino acid sequence of the amyloid β peptide analogue comprises the sequence F₁₉X₂₀A₂₁-Q-A₃₀I₃₁I₃₂, with X₂₀ representing an amino acid, in particular as defined herein, and Q being an amino acid sequence comprising the sequence VGSN.

[0112] The amino acid sequence Q usually consists of 5, 6, 7, or 8 amino acid residues. According to a particular embodiment, it forms the loop. i.e., some or all amino acids of Q are arranged so as to form the loop.

[0113] Amyloid β peptide analogues comprising the sequence

F₁₉X₂₀A₂₁X₂₂D₂₃V₂₄G₂₅S₂₆N₂₇K₂₈X₂₉A₃₀I₃₁I₃₂, wherein each of X₂₀, X₂₂, X₂₉ independently represents an amino acid residue, in particular as defined herein, represent a preferred embodiment of the invention. In these amyloid β peptide analogues, the amino acid sequences F₁₉X₂₀A₂₁ and A₃₀I₃₁I₃₂ are preferably in anti-parallel orientation. More particularly, it is preferred if the interproton distance for at least one atom pair selected from the group consisting of F₁₉(NH)—I₃₂(NH), F₁₉(NH)—I₃₂(HB), F₁₉(NH)—I₃₂(CG2), A₂₁(NH)-A₃₀(NH), A₂₁(NH)-A₃₀(CB), A₂₁(NH)—I₃₁(CD1), A₂₁(NH)—I₃₁(CG2), I₃₂(NH)—F₁₉(CD1), I₃₂(NH)—F₁₉(CD2), I₃₂(HN)—F₁₉(CB), and A₃₀(NH)-A₂₁(CB) is 1.8 to 6.5 Angstroms. It is also preferred if the atom pairs F₁₉(CO)—I₃₂(N), I₃₂(CO)—F₁₉(N), A₂₁(CO)-A₃₀(N), and A₃₀(CO)-A₂₁(N) are at a distance of 3.3±0.5 Å, wherein CO indicates the backbone oxygen atom, and the phi (φ) angles of the residues range from −180 to −30 and psi (ψ) angles of the residues range from approximately 60 to 180 or from approximately −180 to −150.

[0114] According to a further particular embodiment, the amino acid sequence of the amyloid β peptide analogue is a sequence selected from the group consisting of SEQ ID NO: 369-698, wherein
[0115] X₁₂ is valine, leucine, isoleucine, alanine, methionine, or an amino acid residue which is covalently linked to another amino acid residue of the sequence;
[0116] X₁₃ is histidine, tyrosine, serine, methionine, or an amino acid residue which is covalently linked to another amino acid residue of the sequence;
[0117] X₁₄ is histidine, tyrosine, serine, methionine, or an amino acid residue which is covalently linked to another amino acid residue of the sequence;
[0118] X₁₅ is glutamine, asparagine, methionine, serine, or an amino acid residue which is covalently linked to another amino acid residue of the sequence;
[0119] X₁₆ is lysine, arginine, or an amino acid residue which is covalently linked to another amino acid residue of the sequence;
[0120] X₁₇ is leucine, isoleucine, valine, phenylalanine, methionine, or an amino acid residue which is covalently linked to another amino acid residue of the sequence;
[0121] X₁₈ is valine, leucine, isoleucine, alanine, methionine, or an amino acid residue which is covalently linked to another amino acid residue of the sequence
[0122] X₁₉ is phenylalanine, tyrosine, valine, leucine, isoleucine, methionine, or an amino acid residue which is covalently linked to another amino acid residue of the sequence;
[0123] X₂₀ is phenylalanine, tyrosine, valine, leucine, isoleucine, methionine, or an amino acid residue which is covalently linked to another amino acid residue of the sequence;
[0124] X₂₁ is alanine, valine, glycine, serine, or an amino acid residue which is covalently linked to another amino acid residue of the sequence;
[0125] X₂₂ is glutamic acid, aspartic acid, or an amino acid residue which is covalently linked to another amino acid residue of the sequence;
[0126] X₂₉ is glycine, alanine, and serine, or an amino acid residue which is covalently linked to another amino acid residue of the sequence;
[0127] X₃₀ is alanine, valine, glycine, serine, or an amino acid residue which is covalently linked to another amino acid residue of the sequence;
[0128] X₃₁ is isoleucine, leucine, valine, phenylalanine, methionine, or an amino acid residue which is covalently linked to another amino acid residue of the sequence;
[0129] X₃₂ is isoleucine, leucine, valine, phenylalanine, methionine, or an amino acid residue which is covalently linked to another amino acid residue of the sequence;
[0130] X₃₃ is glycine, alanine, serine, or an amino acid residue which is covalently linked to another amino acid residue of the sequence;
[0131] X₃₄ is leucine, isoleucine, valine, phenylalanine, methionine, or an amino acid residue which is covalently linked to another amino acid residue of the sequence;
[0132] X₃₅ is methionine, valine, leucine, isoleucine, alanine, or an amino acid residue which is covalently linked to another amino acid residue of the sequence;
[0133] X₃₆ is valine, leucine, isoleucine, alanine, methionine, or an amino acid residue which is covalently linked to another amino acid residue of the sequence;
[0134] X₃₇ is glycine, alanine, serine, or an amino acid residue which is covalently linked to another amino acid residue of the sequence;
[0135] X₃₈ is glycine, alanine, serine, or an amino acid residue which is covalently linked to another amino acid residue of the sequence; and
[0136] X₃₉ is valine, leucine, isoleucine, alanine, methionine, or an amino acid residue which is covalently linked to another amino acid residue of the sequence,
   at least one amino acid residue selected from the group consisting of X₁₂, X₁₃, X₁₄, X₁₅, X₁₆, X₁₇, X₁₈, X₁₉, X₂₀, X₂₁ and X₂₂ and at least one amino acid residue selected from the group consisting of X₂₉, X₃₀, X₃₁, X₃₂, X₃₃, X₃₄, X₃₅, X₃₆, X₃₇, X₃₈ and X₃₉ being covalently linked with each other.

| Sequence | |
|---|---|
| DAEFRHDSGYEX₁₂X₁₃X₁₄X₁₅X₁₆X₁₇X₁₈X₁₉X₂₀X₂₁X₂₂DVGSNKX₂₉X₃₀X₃₁X₃₂X₃₃X₃₄X₃₅X₃₆X₃₇X₃₈X₃₉VIAT | 369 |
| AEFRHDSGYEX₁₂X₁₃X₁₄X₁₅X₁₆X₁₇X₁₈X₁₉X₂₀X₂₁X₂₂DVGSNKX₂₉X₃₀X₃₁X₃₂X₃₃X₃₄X₃₅X₃₆X₃₇X₃₈X₃₉VIAT | 370 |
| EFRHDSGYEX₁₂X₁₃X₁₄X₁₅X₁₆X₁₇X₁₈X₁₉X₂₀X₂₁X₂₂DVGSNKX₂₉X₃₀X₃₁X₃₂X₃₃X₃₄X₃₅X₃₆X₃₇X₃₈X₃₉VIAT | 371 |
| FRHDSGYEX₁₂X₁₃X₁₄X₁₅X₁₆X₁₇X₁₈X₁₉X₂₀X₂₁X₂₂DVGSNKX₂₉X₃₀X₃₁X₃₂X₃₃X₃₄X₃₅X₃₆X₃₇X₃₈X₃₉VIAT | 372 |
| RHDSGYEX₁₂X₁₃X₁₄X₁₅X₁₆X₁₇X₁₈X₁₉X₂₀X₂₁X₂₂DVGSNKX₂₉X₃₀X₃₁X₃₂X₃₃X₃₄X₃₅X₃₆X₃₇X₃₈X₃₉VIAT | 373 |
| HDSGYEX₁₂X₁₃X₁₄X₁₅X₁₆X₁₇X₁₈X₁₉X₂₀X₂₁X₂₂DVGSNKX₂₉X₃₀X₃₁X₃₂X₃₃X₃₄X₃₅X₃₆X₃₇X₃₈X₃₉VIAT | 374 |
| DSGYEX₁₂X₁₃X₁₄X₁₅X₁₆X₁₇X₁₈X₁₉X₂₀X₂₁X₂₂DVGSNKX₂₉X₃₀X₃₁X₃₂X₃₃X₃₄X₃₅X₃₆X₃₇X₃₈X₃₉VIAT | 375 |
| SGYEX₁₂X₁₃X₁₄X₁₅X₁₆X₁₇X₁₈X₁₉X₂₀X₂₁X₂₂DVGSNKX₂₉X₃₀X₃₁X₃₂X₃₃X₃₄X₃₅X₃₆X₃₇X₃₈X₃₉VIAT | 376 |
| GYEX₁₂X₁₃X₁₄X₁₅X₁₆X₁₇X₁₈X₁₉X₂₀X₂₁X₂₂DVGSNKX₂₉X₃₀X₃₁X₃₂X₃₃X₃₄X₃₅X₃₆X₃₇X₃₈X₃₉VIAT | 377 |
| YEX₁₂X₁₃X₁₄X₁₅X₁₆X₁₇X₁₈X₁₉X₂₀X₂₁X₂₂DVGSNKX₂₉X₃₀X₃₁X₃₂X₃₃X₃₄X₃₅X₃₆X₃₇X₃₈X₃₉VIAT | 378 |
| EX₁₂X₁₃X₁₄X₁₅X₁₆X₁₇X₁₈X₁₉X₂₀X₂₁X₂₂DVGSNKX₂₉X₃₀X₃₁X₃₂X₃₃X₃₄X₃₅X₃₆X₃₇X₃₈X₃₉VIAT | 379 |
| X₁₂X₁₃X₁₄X₁₅X₁₆X₁₇X₁₈X₁₉X₂₀X₂₁X₂₂DVGSNKX₂₉X₃₀X₃₁X₃₂X₃₃X₃₄X₃₅X₃₆X₃₇X₃₈X₃₉VIAT | 380 |
| X₁₃X₁₄X₁₅X₁₆X₁₇X₁₈X₁₉X₂₀X₂₁X₂₂DVGSNKX₂₉X₃₀X₃₁X₃₂X₃₃X₃₄X₃₅X₃₆X₃₇X₃₈VVIAT | 381 |
| X₁₄X₁₅X₁₆X₁₇X₁₈X₁₉X₂₀X₂₁X₂₂DVGSNKX₂₉X₃₀X₃₁X₃₂X₃₃X₃₄X₃₅X₃₆X₃₇GVVIAT | 382 |
| X₁₅X₁₆X₁₇X₁₈X₁₉X₂₀X₂₁X₂₂DVGSNKX₂₉X₃₀X₃₁X₃₂X₃₃X₃₄X₃₅X₃₆GGVVIAT | 383 |
| X₁₆X₁₇X₁₈X₁₉X₂₀X₂₁X₂₂DVGSNKX₂₉X₃₀X₃₁X₃₂X₃₃X₃₄X₃₅VGGVVIAT | 384 |
| X₁₇X₁₈X₁₉X₂₀X₂₁X₂₂DVGSNKX₂₉X₃₀X₃₁X₃₂X₃₃X₃₄MVGGVVIAT | 385 |
| X₁₈X₁₉X₂₀X₂₁X₂₂DVGSNKX₂₉X₃₀X₃₁X₃₂X₃₃LMVGGVVIAT | 386 |
| X₁₉X₂₀X₂₁X₂₂DVGSNKX₂₉X₃₀X₃₁X₃₂GLMVGGVVIAT | 387 |
| X₂₀X₂₁X₂₂DVGSNKX₂₉X₃₀X₃₁IGLMVGGVVIAT | 388 |
| X₂₁X₂₂DVGSNKX₂₉X₃₀IIGLMVGGVVIAT | 389 |
| X₂₂DVGSNKX₂₉AIIGLMVGGVVIAT | 390 |
| DAEFRHDSGYEX₁₂X₁₃X₁₄X₁₅X₁₆X₁₇X₁₈X₁₉X₂₀X₂₁X₂₂DVGSNKX₂₉X₃₀X₃₁X₃₂X₃₃X₃₄X₃₅X₃₆X₃₇X₃₈X₃₉VIA | 391 |
| AEFRHDSGYEX₁₂X₁₃X₁₄X₁₅X₁₆X₁₇X₁₈X₁₉X₂₀X₂₁X₂₂DVGSNKX₂₉X₃₀X₃₁X₃₂X₃₃X₃₄X₃₅X₃₆X₃₇X₃₈X₃₉VIA | 392 |
| EFRHDSGYEX₁₂X₁₃X₁₄X₁₅X₁₆X₁₇X₁₈X₁₉X₂₀X₂₁X₂₂DVGSNKX₂₉X₃₀X₃₁X₃₂X₃₃X₃₄X₃₅X₃₆X₃₇X₃₈X₃₉VIA | 393 |
| FRHDSGYEX₁₂X₁₃X₁₄X₁₅X₁₆X₁₇X₁₈X₁₉X₂₀X₂₁X₂₂DVGSNKX₂₉X₃₀X₃₁X₃₂X₃₃X₃₄X₃₅X₃₆X₃₇X₃₈X₃₉VIA | 394 |
| RHDSGYEX₁₂X₁₃X₁₄X₁₅X₁₆X₁₇X₁₈X₁₉X₂₀X₂₁X₂₂DVGSNKX₂₉X₃₀X₃₁X₃₂X₃₃X₃₄X₃₅X₃₆X₃₇X₃₈X₃₉VIA | 395 |
| HDSGYEX₁₂X₁₃X₁₄X₁₅X₁₆X₁₇X₁₈X₁₉X₂₀X₂₁X₂₂DVGSNKX₂₉X₃₀X₃₁X₃₂X₃₃X₃₄X₃₅X₃₆X₃₇X₃₈X₃₉VIA | 396 |
| DSGYEX₁₂X₁₃X₁₄X₁₅X₁₆X₁₇X₁₈X₁₉X₂₀X₂₁X₂₂DVGSNKX₂₉X₃₀X₃₁X₃₂X₃₃X₃₄X₃₅X₃₆X₃₇X₃₈X₃₉VIA | 397 |
| SGYEX₁₂X₁₃X₁₄X₁₅X₁₆X₁₇X₁₈X₁₉X₂₀X₂₁X₂₂DVGSNKX₂₉X₃₀X₃₁X₃₂X₃₃X₃₄X₃₅X₃₆X₃₇X₃₈X₃₉VIA | 398 |
| GYEX₁₂X₁₃X₁₄X₁₅X₁₆X₁₇X₁₈X₁₉X₂₀X₂₁X₂₂DVGSNKX₂₉X₃₀X₃₁X₃₂X₃₃X₃₄X₃₅X₃₆X₃₇X₃₈X₃₉VIA | 399 |
| YEX₁₂X₁₃X₁₄X₁₅X₁₆X₁₇X₁₈X₁₉X₂₀X₂₁X₂₂DVGSNKX₂₉X₃₀X₃₁X₃₂X₃₃X₃₄X₃₅X₃₆X₃₇X₃₈X₃₉VIA | 400 |
| EX₁₂X₁₃X₁₄X₁₅X₁₆X₁₇X₁₈X₁₉X₂₀X₂₁X₂₂DVGSNKX₂₉X₃₀X₃₁X₃₂X₃₃X₃₄X₃₅X₃₆X₃₇X₃₈X₃₉VIA | 401 |
| X₁₂X₁₃X₁₄X₁₅X₁₆X₁₇X₁₈X₁₉X₂₀X₂₁X₂₂DVGSNKX₂₉X₃₀X₃₁X₃₂X₃₃X₃₄X₃₅X₃₆X₃₇X₃₈X₃₉VIA | 402 |
| X₁₃X₁₄X₁₅X₁₆X₁₇X₁₈X₁₉X₂₀X₂₁X₂₂DVGSNKX₂₉X₃₀X₃₁X₃₂X₃₃X₃₄X₃₅X₃₆X₃₇X₃₈VVIA | 403 |
| X₁₄X₁₅X₁₆X₁₇X₁₈X₁₉X₂₀X₂₁X₂₂DVGSNKX₂₉X₃₀X₃₁X₃₂X₃₃X₃₄X₃₅X₃₆X₃₇GVVIA | 404 |
| X₁₅X₁₆X₁₇X₁₈X₁₉X₂₀X₂₁X₂₂DVGSNKX₂₉X₃₀X₃₁X₃₂X₃₃X₃₄X₃₅X₃₆GGVVIA | 405 |
| X₁₆X₁₇X₁₈X₁₉X₂₀X₂₁X₂₂DVGSNKX₂₉X₃₀X₃₁X₃₂X₃₃X₃₄X₃₅VGGVVIA | 406 |
| X₁₇X₁₈X₁₉X₂₀X₂₁X₂₂DVGSNKX₂₉X₃₀X₃₁X₃₂X₃₃X₃₄MVGGVVIA | 407 |
| X₁₈X₁₉X₂₀X₂₁X₂₂DVGSNKX₂₉X₃₀X₃₁X₃₂X₃₃LMVGGVVIA | 408 |
| X₁₉X₂₀X₂₁X₂₂DVGSNKX₂₉X₃₀X₃₁X₃₂GLMVGGVVIA | 409 |
| X₂₀X₂₁X₂₂DVGSNKX₂₉X₃₀X₃₁IGLMVGGVVIA | 410 |
| X₂₁X₂₂DVGSNKX₂₉X₃₀IIGLMVGGVVIA | 411 |
| X₂₂DVGSNKX₂₉AIIGLMVGGVVIA | 412 |
| DAEFRHDSGYEX₁₂X₁₃X₁₄X₁₅X₁₆X₁₇X₁₈X₁₉X₂₀X₂₁X₂₂DVGSNKX₂₉X₃₀X₃₁X₃₂X₃₃X₃₄X₃₅X₃₆X₃₇X₃₈X₃₉VI | 413 |
| AEFRHDSGYEX₁₂X₁₃X₁₄X₁₅X₁₆X₁₇X₁₈X₁₉X₂₀X₂₁X₂₂DVGSNKX₂₉X₃₀X₃₁X₃₂X₃₃X₃₄X₃₅X₃₆X₃₇X₃₈X₃₉VI | 414 |
| EFRHDSGYEX₁₂X₁₃X₁₄X₁₅X₁₆X₁₇X₁₈X₁₉X₂₀X₂₁X₂₂DVGSNKX₂₉X₃₀X₃₁X₃₂X₃₃X₃₄X₃₅X₃₆X₃₇X₃₈X₃₉VI | 415 |
| FRHDSGYEX₁₂X₁₃X₁₄X₁₅X₁₆X₁₇X₁₈X₁₉X₂₀X₂₁X₂₂DVGSNKX₂₉X₃₀X₃₁X₃₂X₃₃X₃₄X₃₅X₃₆X₃₇X₃₈X₃₉VI | 416 |
| RHDSGYEX₁₂X₁₃X₁₄X₁₅X₁₆X₁₇X₁₈X₁₉X₂₀X₂₁X₂₂DVGSNKX₂₉X₃₀X₃₁X₃₂X₃₃X₃₄X₃₅X₃₆X₃₇X₃₈X₃₉VI | 417 |
| HDSGYEX₁₂X₁₃X₁₄X₁₅X₁₆X₁₇X₁₈X₁₉X₂₀X₂₁X₂₂DVGSNKX₂₉X₃₀X₃₁X₃₂X₃₃X₃₄X₃₅X₃₆X₃₇X₃₈X₃₉VI | 418 |
| DSGYEX₁₂X₁₃X₁₄X₁₅X₁₆X₁₇X₁₈X₁₉X₂₀X₂₁X₂₂DVGSNKX₂₉X₃₀X₃₁X₃₂X₃₃X₃₄X₃₅X₃₆X₃₇X₃₈X₃₉VI | 419 |
| SGYEX₁₂X₁₃X₁₄X₁₅X₁₆X₁₇X₁₈X₁₉X₂₀X₂₁X₂₂DVGSNKX₂₉X₃₀X₃₁X₃₂X₃₃X₃₄X₃₅X₃₆X₃₇X₃₈X₃₉VI | 420 |
| GYEX₁₂X₁₃X₁₄X₁₅X₁₆X₁₇X₁₈X₁₉X₂₀X₂₁X₂₂DVGSNKX₂₉X₃₀X₃₁X₃₂X₃₃X₃₄X₃₅X₃₆X₃₇X₃₈X₃₉VI | 421 |
| YEX₁₂X₁₃X₁₄X₁₅X₁₆X₁₇X₁₈X₁₉X₂₀X₂₁X₂₂DVGSNKX₂₉X₃₀X₃₁X₃₂X₃₃X₃₄X₃₅X₃₆X₃₇X₃₈X₃₉VI | 422 |
| EX₁₂X₁₃X₁₄X₁₅X₁₆X₁₇X₁₈X₁₉X₂₀X₂₁X₂₂DVGSNKX₂₉X₃₀X₃₁X₃₂X₃₃X₃₄X₃₅X₃₆X₃₇X₃₈X₃₉VI | 423 |
| X₁₂X₁₃X₁₄X₁₅X₁₆X₁₇X₁₈X₁₉X₂₀X₂₁X₂₂DVGSNKX₂₉X₃₀X₃₁X₃₂X₃₃X₃₄X₃₅X₃₆X₃₇X₃₈X₃₉VI | 424 |
| X₁₃X₁₄X₁₅X₁₆X₁₇X₁₈X₁₉X₂₀X₂₁X₂₂DVGSNKX₂₉X₃₀X₃₁X₃₂X₃₃X₃₄X₃₅X₃₆X₃₇X₃₈VVI | 425 |
| X₁₄X₁₅X₁₆X₁₇X₁₈X₁₉X₂₀X₂₁X₂₂DVGSNKX₂₉X₃₀X₃₁X₃₂X₃₃X₃₄X₃₅X₃₆X₃₇GVVI | 426 |
| X₁₅X₁₆X₁₇X₁₈X₁₉X₂₀X₂₁X₂₂DVGSNKX₂₉X₃₀X₃₁X₃₂X₃₃X₃₄X₃₅X₃₆GGVVI | 427 |
| X₁₆X₁₇X₁₈X₁₉X₂₀X₂₁X₂₂DVGSNKX₂₉X₃₀X₃₁X₃₂X₃₃X₃₄X₃₅VGGVVI | 428 |
| X₁₇X₁₈X₁₉X₂₀X₂₁X₂₂DVGSNKX₂₉X₃₀X₃₁X₃₂X₃₃X₃₄MVGGVVI | 429 |
| X₁₈X₁₉X₂₀X₂₁X₂₂DVGSNKX₂₉X₃₀X₃₁X₃₂X₃₃LMVGGVVI | 430 |
| X₁₉X₂₀X₂₁X₂₂DVGSNKX₂₉X₃₀X₃₁X₃₂GLMVGGVVI | 431 |
| X₂₀X₂₁X₂₂DVGSNKX₂₉X₃₀X₃₁IGLMVGGVVI | 432 |
| X₂₁X₂₂DVGSNKX₂₉X₃₀IIGLMVGGVVI | 433 |
| X₂₂DVGSNKX₂₉AIIGLMVGGVVI | 434 |
| DAEFRHDSGYEX₁₂X₁₃X₁₄X₁₅X₁₆X₁₇X₁₈X₁₉X₂₀X₂₁X₂₂DVGSNKX₂₉X₃₀X₃₁X₃₂X₃₃X₃₄X₃₅X₃₆X₃₇X₃₈X₃₉V | 435 |
| AEFRHDSGYEX₁₂X₁₃X₁₄X₁₅X₁₆X₁₇X₁₈X₁₉X₂₀X₂₁X₂₂DVGSNKX₂₉X₃₀X₃₁X₃₂X₃₃X₃₄X₃₅X₃₆X₃₇X₃₈X₃₉V | 436 |
| EFRHDSGYEX₁₂X₁₃X₁₄X₁₅X₁₆X₁₇X₁₈X₁₉X₂₀X₂₁X₂₂DVGSNKX₂₉X₃₀X₃₁X₃₂X₃₃X₃₄X₃₅X₃₆X₃₇X₃₈X₃₉V | 437 |
| FRHDSGYEX₁₂X₁₃X₁₄X₁₅X₁₆X₁₇X₁₈X₁₉X₂₀X₂₁X₂₂DVGSNKX₂₉X₃₀X₃₁X₃₂X₃₃X₃₄X₃₅X₃₆X₃₇X₃₈X₃₉V | 438 |
| RHDSGYX₁₂X₁₃X₁₄X₁₅X₁₆X₁₇X₁₈X₁₉X₂₀X₂₁X₂₂DVGSNKX₂₉X₃₀X₃₁X₃₂X₃₃X₃₄X₃₅X₃₆X₃₇X₃₈X₃₉V | 439 |
| HDSGYEX₁₂X₁₃X₁₄X₁₅X₁₆X₁₇X₁₈X₁₉X₂₀X₂₁X₂₂DVGSNKX₂₉X₃₀X₃₁X₃₂X₃₃X₃₄X₃₅X₃₆X₃₇X₃₈X₃₉V | 440 |
| DSGYEX₁₂X₁₃X₁₄X₁₅X₁₆X₁₇X₁₈X₁₉X₂₀X₂₁X₂₂DVGSNKX₂₉X₃₀X₃₁X₃₂X₃₃X₃₄X₃₅X₃₆X₃₇X₃₈X₃₉V | 441 |
| SGYEX₁₂X₁₃X₁₄X₁₅X₁₆X₁₇X₁₈X₁₉X₂₀X₂₁X₂₂DVGSNKX₂₉X₃₀X₃₁X₃₂X₃₃X₃₄X₃₅X₃₆X₃₇X₃₈X₃₉V | 442 |
| GYEX₁₂X₁₃X₁₄X₁₅X₁₆X₁₇X₁₈X₁₉X₂₀X₂₁X₂₂DVGSNKX₂₉X₃₀X₃₁X₃₂X₃₃X₃₄X₃₅X₃₆X₃₇X₃₈X₃₉V | 443 |
| YEX₁₂X₁₃X₁₄X₁₅X₁₆X₁₇X₁₈X₁₉X₂₀X₂₁X₂₂DVGSNKX₂₉X₃₀X₃₁X₃₂X₃₃X₃₄X₃₅X₃₆X₃₇X₃₈X₃₉V | 444 |
| EX₁₂X₁₃X₁₄X₁₅X₁₆X₁₇X₁₈X₁₉X₂₀X₂₁X₂₂DVGSNKX₂₉X₃₀X₃₁X₃₂X₃₃X₃₄X₃₅X₃₆X₃₇X₃₈X₃₉V | 445 |
| X₁₂X₁₃X₁₄X₁₅X₁₆X₁₇X₁₈X₁₉X₂₀X₂₁X₂₂DVGSNKX₂₉X₃₀X₃₁X₃₂X₃₃X₃₄X₃₅X₃₆X₃₇X₃₈X₃₉V | 446 |
| X₁₃X₁₄X₁₅X₁₆X₁₇X₁₈X₁₉X₂₀X₂₁X₂₂DVGSNKX₂₉X₃₀X₃₁X₃₂X₃₃X₃₄X₃₅X₃₆X₃₇X₃₈VV | 447 |
| X₁₄X₁₅X₁₆X₁₇X₁₈X₁₉X₂₀X₂₁X₂₂DVGSNKX₂₉X₃₀X₃₁X₃₂X₃₃X₃₄X₃₅X₃₆X₃₇GVV | 448 |
| X₁₅X₁₆X₁₇X₁₈X₁₉X₂₀X₂₁X₂₂DVGSNKX₂₉X₃₀X₃₁X₃₂X₃₃X₃₄X₃₅X₃₆GGVV | 449 |
| X₁₆X₁₇X₁₈X₁₉X₂₀X₂₁X₂₂DVGSNKX₂₉X₃₀X₃₁X₃₂X₃₃X₃₄X₃₅VGGVV | 450 |
| X₁₇X₁₈X₁₉X₂₀X₂₁X₂₂DVGSNKX₂₉X₃₀X₃₁X₃₂X₃₃X₃₄MVGGVV | 451 |
| X₁₈X₁₉X₂₀X₂₁X₂₂DVGSNKX₂₉X₃₀X₃₁X₃₂X₃₃LMVGGVV | 452 |
| X₁₉X₂₀X₂₁X₂₂DVGSNKX₂₉X₃₀X₃₁X₃₂GLMVGGVV | 453 |
| X₂₀X₂₁X₂₂DVGSNKX₂₉X₃₀X₃₁IGLMVGGVV | 454 |
| ₂₁X₂₂DVGSNKX₂₉X₃₀IIGLMVGGVV | 455 |
| X₂₂DVGSNKX₂₉AIIGLMVGGVV | 456 |
| DAEFRHDSGYEX₁₂X₁₃X₁₄X₁₅X₁₆X₁₇X₁₈X₁₉X₂₀X₂₁X₂₂DVGSNKX₂₉X₃₀X₃₁X₃₂X₃₃X₃₄X₃₅X₃₆X₃₇X₃₈X₃₉ | 457 |
| AEFRHDSGYEX₁₂X₁₃X₁₄X₁₅X₁₆X₁₇X₁₈X₁₉X₂₀X₂₁X₂₂DVGSNKX₂₉X₃₀X₃₁X₃₂X₃₃X₃₄X₃₅X₃₆X₃₇X₃₈X₃₉ | 458 |
| EFRHDSGYEX₁₂X₁₃X₁₄X₁₅X₁₆X₁₇X₁₈X₁₉X₂₀X₂₁X₂₂DVGSNKX₂₉X₃₀X₃₁X₃₂X₃₃X₃₄X₃₅X₃₆X₃₇X₃₈X₃₉ | 459 |
| FRHDSGYEX₁₂X₁₃X₁₄X₁₅X₁₆X₁₇X₁₈X₁₉X₂₀X₂₁X₂₂DVGSNKX₂₉X₃₀X₃₁X₃₂X₃₃X₃₄X₃₅X₃₆X₃₇X₃₈X₃₉ | 460 |
| RHDSGYEX₁₂X₁₃X₁₄X₁₅X₁₆X₁₇X₁₈X₁₉X₂₀X₂₁X₂₂DVGSNKX₂₉X₃₀X₃₁X₃₂X₃₃X₃₄X₃₅X₃₆X₃₇X₃₈X₃₉ | 461 |
| HDSGYEX₁₂X₁₃X₁₄X₁₅X₁₆X₁₇X₁₈X₁₉X₂₀X₂₁X₂₂DVGSNKX₂₉X₃₀X₃₁X₃₂X₃₃X₃₄X₃₅X₃₆X₃₇X₃₈X₃₉ | 462 |
| DSGYEX₁₂X₁₃X₁₄X₁₅X₁₆X₁₇X₁₈X₁₉X₂₀X₂₁X₂₂DVGSNKX₂₉X₃₀X₃₁X₃₂X₃₃X₃₄X₃₅X₃₆X₃₇X₃₈X₃₉ | 463 |
| SGYEX₁₂X₁₃X₁₄X₁₅X₁₆X₁₇X₁₈X₁₉X₂₀X₂₁X₂₂DVGSNKX₂₉X₃₀X₃₁X₃₂X₃₃X₃₄X₃₅X₃₆X₃₇X₃₈X₃₉ | 464 |
| GYEX₁₂X₁₃X₁₄X₁₅X₁₆X₁₇X₁₈X₁₉X₂₀X₂₁X₂₂DVGSNKX₂₉X₃₀X₃₁X₃₂X₃₃X₃₄X₃₅X₃₆X₃₇X₃₈X₃₉ | 465 |
| YEX₁₂X₁₃X₁₄X₁₅X₁₆X₁₇X₁₈X₁₉X₂₀X₂₁X₂₂DVGSNKX₂₉X₃₀X₃₁X₃₂X₃₃X₃₄X₃₅X₃₆X₃₇X₃₈X₃₉ | 466 |
| EX₁₂X₁₃X₁₄X₁₅X₁₆X₁₇X₁₈X₁₉X₂₀X₂₁X₂₂DVGSNKX₂₉X₃₀X₃₁X₃₂X₃₃X₃₄X₃₅X₃₆X₃₇X₃₈X₃₉ | 467 |
| X₁₂X₁₃X₁₄X₁₅X₁₆X₁₇X₁₈X₁₉X₂₀X₂₁X₂₂DVGSNKX₂₉X₃₀X₃₁X₃₂X₃₃X₃₄X₃₅X₃₆X₃₇X₃₈X₃₉ | 468 |
| X₁₃X₁₄X₁₅X₁₆X₁₇X₁₈X₁₉X₂₀X₂₁X₂₂DVGSNKX₂₉X₃₀X₃₁X₃₂X₃₃X₃₄X₃₅X₃₆X₃₇X₃₈V | 469 |
| X₁₄X₁₅X₁₆X₁₇X₁₈X₁₉X₂₀X₂₁X₂₂DVGSNKX₂₉X₃₀X₃₁X₃₂X₃₃X₃₄X₃₅X₃₆X₃₇GV | 470 |
| X₁₅X₁₆X₁₇X₁₈X₁₉X₂₀X₂₁X₂₂DVGSNKX₂₉X₃₀X₃₁X₃₂X₃₃X₃₄X₃₅X₃₆GGV | 471 |
| X₁₆X₁₇X₁₈X₁₉X₂₀X₂₁X₂₂DVGSNKX₂₉X₃₀X₃₁X₃₂X₃₃X₃₄X₃₅VGGV | 472 |
| X₁₇X₁₈X₁₉X₂₀X₂₁X₂₂DVGSNKX₂₉X₃₀X₃₁X₃₂X₃₃X₃₄MVGGV | 473 |
| X₁₈X₁₉X₂₀X₂₁X₂₂DVGSNKX₂₉X₃₀X₃₁X₃₂X₃₃LMVGGV | 474 |
| X₁₉X₂₀X₂₁X₂₂DVGSNKX₂₉X₃₀X₃₁X₃₂GLMVGGV | 475 |
| X₂₀X₂₁X₂₂DVGSNKX₂₉X₃₀X₃₁IGLMVGGV | 476 |
| X₂₁X₂₂DVGSNKX₂₉X₃₀IIGLMVGGV | 477 |
| X₂₂DVGSNKX₂₉AIIGLMVGGV | 478 |
| DAEFRHDSGYEVX₁₃X₁₄X₁₅X₁₆X₁₇X₁₈X₁₉X₂₀X₂₁X₂₂DVGSNKX₂₉X₃₀X₃₁X₃₂X₃₃X₃₄X₃₅X₃₆X₃₇X₃₈ | 479 |
| AEFRHDSGYEVX₁₃X₁₄X₁₅X₁₆X₁₇X₁₈X₁₉X₂₀X₂₁X₂₂DVGSNKX₂₉X₃₀X₃₁X₃₂X₃₃X₃₄X₃₅X₃₆X₃₇X₃₈ | 480 |
| EFRHDSGYEVX₁₃X₁₄X₁₅X₁₆X₁₇X₁₈X₁₉X₂₀X₂₁X₂₂DVGSNKX₂₉X₃₀X₃₁X₃₂X₃₃X₃₄X₃₅X₃₆X₃₇X₃₈ | 481 |
| FRHDSGYEVX₁₃X₁₄X₁₅X₁₆X₁₇X₁₈X₁₉X₂₀X₂₁X₂₂DVGSNKX₂₉X₃₀X₃₁X₃₂X₃₃X₃₄X₃₅X₃₆X₃₇X₃₈ | 482 |
| RHDSGYEVX₁₃X₁₄X₁₅X₁₆X₁₇X₁₈X₁₉X₂₀X₂₁X₂₂DVGSNKX₂₉X₃₀X₃₁X₃₂X₃₃X₃₄X₃₅X₃₆X₃₇X₃₈ | 483 |
| HDSGYEVX₁₃X₁₄X₁₅X₁₆X₁₇X₁₈X₁₉X₂₀X₂₁X₂₂DVGSNKX₂₉X₃₀X₃₁X₃₂X₃₃X₃₄X₃₅X₃₆X₃₇X₃₈ | 484 |
| DSGYEVX₁₃X₁₄X₁₅X₁₆X₁₇X₁₈X₁₉X₂₀X₂₁X₂₂DVGSNKX₂₉X₃₀X₃₁X₃₂X₃₃X₃₄X₃₅X₃₆X₃₇X₃₈ | 485 |
| SGYEVX₁₃X₁₄X₁₅X₁₆X₁₇X₁₈X₁₉X₂₀X₂₁X₂₂DVGSNKX₂₉X₃₀X₃₁X₃₂X₃₃X₃₄X₃₅X₃₆X₃₇X₃₈ | 486 |
| GYEVX₁₃X₁₄X₁₅X₁₆X₁₇X₁₈X₁₉X₂₀X₂₁X₂₂DVGSNKX₂₉X₃₀X₃₁X₃₂X₃₃X₃₄X₃₅X₃₆X₃₇X₃₈ | 487 |
| YEVX₁₃X₁₄X₁₅X₁₆X₁₇X₁₈X₁₉X₂₀X₂₁X₂₂DVGSNKX₂₉X₃₀X₃₁X₃₂X₃₃X₃₄X₃₅X₃₆X₃₇X₃₈ | 488 |
| EVX₁₃X₁₄X₁₅X₁₆X₁₇X₁₈X₁₉X₂₀X₂₁X₂₂DVGSNKX₂₉X₃₀X₃₁X₃₂X₃₃X₃₄X₃₅X₃₆X₃₇X₃₈ | 489 |
| VX₁₃X₁₄X₁₅X₁₆X₁₇X₁₈X₁₉X₂₀X₂₁X₂₂DVGSNKX₂₉X₃₀X₃₁X₃₂X₃₃X₃₄X₃₅X₃₆X₃₇X₃₈ | 490 |
| X₁₃X₁₄X₁₅X₁₆X₁₇X₁₈X₁₉X₂₀X₂₁X₂₂DVGSNKX₂₉X₃₀X₃₁X₃₂X₃₃X₃₄X₃₅X₃₆X₃₇X₃₈ | 491 |
| X₁₄X₁₅X₁₆X₁₇X₁₈X₁₉X₂₀X₂₁X₂₂DVGSNKX₂₉X₃₀X₃₁X₃₂X₃₃X₃₄X₃₅X₃₆X₃₇G | 492 |
| X₁₅X₁₆X₁₇X₁₈X₁₉X₂₀X₂₁X₂₂DVGSNKX₂₉X₃₀X₃₁X₃₂X₃₃X₃₄X₃₅X₃₆GG | 493 |
| X₁₆X₁₇X₁₈X₁₉X₂₀X₂₁X₂₂DVGSNKX₂₉X₃₀X₃₁X₃₂X₃₃X₃₄X₃₅VGG | 494 |
| X₁₇X₁₈X₁₉X₂₀X₂₁X₂₂DVGSNKX₂₉X₃₀X₃₁X₃₂X₃₃X₃₄MVGG | 495 |
| X₁₈X₁₉X₂₀X₂₁X₂₂DVGSNKX₂₉X₃₀X₃₁X₃₂X₃₃LMVGG | 496 |
| X₁₉X₂₀X₂₁X₂₂DVGSNKX₂₉X₃₀X₃₁X₃₂GLMVGG | 497 |
| X₂₀X₂₁X₂₂DVGSNKX₂₉X₃₀X₃₁IGLMVGG | 498 |
| X₂₁X₂₂DVGSNKX₂₉X₃₀IIGLMVGG | 499 |
| X₂₂DVGSNKX₂₉AIIGLMVGG | 500 |

| | |
|---|---|
| DAEFRHDSGYEVHX₁₄X₁₅X₁₆X₁₇X₁₈X₁₉X₂₀X₂₁X₂₂DVGSNKX₂₉X₃₀X₃₁X₃₂X₃₃X₃₄X₃₅X₃₆X₃₇ | 501 |

| | |
|---|---|
| AEFRHDSGYEVHX₁₄X₁₅X₁₆X₁₇X₁₈X₁₉X₂₀X₂₁X₂₂DVGSNKX₂₉X₃₀X₃₁X₃₂X₃₃X₃₄X₃₅X₃₆X₃₇ | 502 |
| EFRHDSGYEVHX₁₄X₁₅X₁₆X₁₇X₁₈X₁₉X₂₀X₂₁X₂₂DVGSNKX₂₉X₃₀X₃₁X₃₂X₃₃X₃₄X₃₅X₃₆X₃₇ | 503 |
| FRHDSGYEVHX₁₄X₁₅X₁₆X₁₇X₁₈X₁₉X₂₀X₂₁X₂₂DVGSNKX₂₉X₃₀X₃₁X₃₂X₃₃X₃₄X₃₅X₃₆X₃₇ | 504 |
| RHDSGYEVHX₁₄X₁₅X₁₆X₁₇X₁₈X₁₉X₂₀X₂₁X₂₂DVGSNKX₂₉X₃₀X₃₁X₃₂X₃₃X₃₄X₃₅X₃₆X₃₇ | 505 |
| HDSGYEVHX₁₄X₁₅X₁₆X₁₇X₁₈X₁₉X₂₀X₂₁X₂₂DVGSNKX₂₉X₃₀X₃₁X₃₂X₃₃X₃₄X₃₅X₃₆X₃₇ | 506 |
| DSGYEVHX₁₄X₁₅X₁₆X₁₇X₁₈X₁₉X₂₀X₂₁X₂₂DVGSNKX₂₉X₃₀X₃₁X₃₂X₃₃X₃₄X₃₅X₃₆X₃₇ | 507 |
| SGYEVHX₁₄X₁₅X₁₆X₁₇X₁₈X₁₉X₂₀X₂₁X₂₂DVGSNKX₂₉X₃₀X₃₁X₃₂X₃₃X₃₄X₃₅X₃₆X₃₇ | 508 |
| GYEVHX₁₄X₁₅X₁₆X₁₇X₁₈X₁₉X₂₀X₂₁X₂₂DVGSNKX₂₉X₃₀X₃₁X₃₂X₃₃X₃₄X₃₅X₃₆X₃₇ | 509 |
| YEVHX₁₄X₁₅X₁₆X₁₇X₁₈X₁₉X₂₀X₂₁X₂₂DVGSNKX₂₉X₃₀X₃₁X₃₂X₃₃X₃₄X₃₅X₃₆X₃₇ | 510 |
| EVHX₁₄X₁₅X₁₆X₁₇X₁₈X₁₉X₂₀X₂₁X₂₂DVGSNKX₂₉X₃₀X₃₁X₃₂X₃₃X₃₄X₃₅X₃₆X₃₇ | 511 |
| VHX₁₄X₁₅X₁₆X₁₇X₁₈X₁₉X₂₀X₂₁X₂₂DVGSNKX₂₉X₃₀X₃₁X₃₂X₃₃X₃₄X₃₅X₃₆X₃₇ | 512 |
| HX₁₄X₁₅X₁₆X₁₇X₁₈X₁₉X₂₀X₂₁X₂₂DVGSNKX₂₉X₃₀X₃₁X₃₂X₃₃X₃₄X₃₅X₃₆X₃₇ | 513 |
| X₁₄X₁₅X₁₆X₁₇X₁₈X₁₉X₂₀X₂₁X₂₂DVGSNKX₂₉X₃₀X₃₁X₃₂X₃₃X₃₄X₃₅X₃₆X₃₇ | 514 |
| X₁₅X₁₆X₁₇X₁₈X₁₉X₂₀X₂₁X₂₂DVGSNKX₂₉X₃₀X₃₁X₃₂X₃₃X₃₄X₃₅X₃₆G | 515 |
| X₁₆X₁₇X₁₈X₁₉X₂₀X₂₁X₂₂DVGSNKX₂₉X₃₀X₃₁X₃₂X₃₃X₃₄X₃₅VG | 516 |
| X₁₇X₁₈X₁₉X₂₀X₂₁X₂₂DVGSNKX₂₉X₃₀X₃₁X₃₂X₃₃X₃₄MVG | 517 |
| X₁₈X₁₉X₂₀X₂₁X₂₂DVGSNKX₂₉X₃₀X₃₁X₃₂X₃₃LMVG | 518 |
| X₁₉X₂₀X₂₁X₂₂DVGSNKX₂₉X₃₀X₃₁X₃₂GLMVG | 519 |
| X₂₀X₂₁X₂₂DVGSNKX₂₉X₃₀X₃₁IGLMVG | 520 |
| X₂₁X₂₂DVGSNKX₂₉X₃₀IGLMVGIIGLMVG | 521 |
| X₂₂DVGSNKX₂₉IGLMVGAIIGLMVG | 522 |
| DAEFRHDSGYEVHHX₁₅X₁₆X₁₇X₁₈X₁₉X₂₀X₂₁X₂₂DVGSNKX₂₉X₃₀X₃₁X₃₂X₃₃X₃₄X₃₅X₃₆ | 523 |
| AEFRHDSGYEVHHX₁₅X₁₆X₁₇X₁₈X₁₉X₂₀X₂₁X₂₂DVGSNKX₂₉X₃₀X₃₁X₃₂X₃₃X₃₄X₃₅X₃₆ | 524 |
| EFRHDSGYEVHHX₁₅X₁₆X₁₇X₁₈X₁₉X₂₀X₂₁X₂₂DVGSNKX₂₉X₃₀X₃₁X₃₂X₃₃X₃₄X₃₅X₃₆ | 525 |
| FRHDSGYEVHHX₁₅X₁₆X₁₇X₁₈X₁₉X₂₀X₂₁X₂₂DVGSNKX₂₉X₃₀X₃₁X₃₂X₃₃X₃₄X₃₅X₃₆ | 526 |
| RHDSGYEVHHX₁₅X₁₆X₁₇X₁₈X₁₉X₂₀X₂₁X₂₂DVGSNKX₂₉X₃₀X₃₁X₃₂X₃₃X₃₄X₃₅X₃₆ | 527 |
| HDSGYEVHHX₁₅X₁₆X₁₇X₁₈X₁₉X₂₀X₂₁X₂₂DVGSNKX₂₉X₃₀X₃₁X₃₂X₃₃X₃₄X₃₅X₃₆ | 528 |
| DSGYEVHHX₁₅X₁₆X₁₇X₁₈X₁₉X₂₀X₂₁X₂₂DVGSNKX₂₉X₃₀X₃₁X₃₂X₃₃X₃₄X₃₅X₃₆ | 529 |
| SGYEVHHX₁₅X₁₆X₁₇X₁₈X₁₉X₂₀X₂₁X₂₂DVGSNKX₂₉X₃₀X₃₁X₃₂X₃₃X₃₄X₃₅X₃₆ | 530 |
| GYEVHHX₁₅X₁₆X₁₇X₁₈X₁₉X₂₀X₂₁X₂₂DVGSNKX₂₉X₃₀X₃₁X₃₂X₃₃X₃₄X₃₅X₃₆ | 531 |
| YEVHHX₁₅X₁₆X₁₇X₁₈X₁₉X₂₀X₂₁X₂₂DVGSNKX₂₉X₃₀X₃₁X₃₂X₃₃X₃₄X₃₅X₃₆ | 532 |
| EVHHX₁₅X₁₆X₁₇X₁₈X₁₉X₂₀X₂₁X₂₂DVGSNKX₂₉X₃₀X₃₁X₃₂X₃₃X₃₄X₃₅X₃₆ | 533 |
| VHHX₁₅X₁₆X₁₇X₁₈X₁₉X₂₀X₂₁X₂₂DVGSNKX₂₉X₃₀X₃₁X₃₂X₃₃X₃₄X₃₅X₃₆ | 534 |
| VHX₁₅X₁₆X₁₇X₁₈X₁₉X₂₀X₂₁X₂₂DVGSNKX₂₉X₃₀X₃₁X₃₂X₃₃X₃₄X₃₅X₃₆ | 535 |
| HX₁₅X₁₆X₁₇X₁₈X₁₉X₂₀X₂₁X₂₂DVGSNKX₂₉X₃₀X₃₁X₃₂X₃₃X₃₄X₃₅X₃₆ | 536 |
| X₁₅X₁₆X₁₇X₁₈X₁₉X₂₀X₂₁X₂₂DVGSNKX₂₉X₃₀X₃₁X₃₂X₃₃X₃₄X₃₅X₃₆ | 537 |
| X₁₆X₁₇X₁₈X₁₉X₂₀X₂₁X₂₂DVGSNKX₂₉X₃₀X₃₁X₃₂X₃₃X₃₄X₃₅V | 538 |
| X₁₇X₁₈X₁₉X₂₀X₂₁X₂₂DVGSNKX₂₉X₃₀X₃₁X₃₂X₃₃X₃₄₆MV | 539 |
| X₁₈X₁₉X₂₀X₂₁X₂₂DVGSNKX₂₉X₃₀X₃₁X₃₂X₃₃LMV | 540 |
| X₁₉X₂₀X₂₁X₂₂DVGSNKX₂₉X₃₀X₃₁X₃₂GLMV | 541 |
| X₂₀X₂₁X₂₂DVGSNKX₂₉X₃₀X₃₁IGLMV | 542 |
| X₂₁X₂₂DVGSNKX₂₉X₃₀IIGLMV | 543 |
| X₂₂DVGSNKX₂₉AIIGLMV | 544 |
| DAEFRHDSGYEVHHQX₁₆X₁₇X₁₈X₁₉X₂₀X₂₁X₂₂DVGSNKX₂₉X₃₀X₃₁X₃₂X₃₃X₃₄X₃₅ | 545 |
| AEFRHDSGYEVHHQX₁₆X₁₇X₁₈X₁₉X₂₀X₂₁X₂₂DVGSNKX₂₉X₃₀X₃₁X₃₂X₃₃X₃₄X₃₅ | 546 |
| EFRHDSGYEVHHQX₁₆X₁₇X₁₈X₁₉X₂₀X₂₁X₂₂DVGSNKX₂₉X₃₀X₃₁X₃₂X₃₃X₃₄X₃₅ | 547 |
| FRHDSGYEVHHQX₁₆X₁₇X₁₈X₁₉X₂₀X₂₁X₂₂DVGSNKX₂₉X₃₀X₃₁X₃₂X₃₃X₃₄X₃₅ | 548 |
| RHDSGYEVHHQX₁₆X₁₇X₁₈X₁₉X₂₀X₂₁X₂₂DVGSNKX₂₉X₃₀X₃₁X₃₂X₃₃X₃₄X₃₅ | 549 |
| HDSGYEVHHQX₁₆X₁₇X₁₈X₁₉X₂₀X₂₁X₂₂DVGSNKX₂₉X₃₀X₃₁X₃₂X₃₃X₃₄X₃₅ | 550 |
| DSGYEVHHQX₁₆X₁₇X₁₈X₁₉X₂₀X₂₁X₂₂DVGSNKX₂₉X₃₀X₃₁X₃₂X₃₃X₃₄X₃₅ | 551 |
| SGYEVHHQX₁₆X₁₇X₁₈X₁₉X₂₀X₂₁X₂₂DVGSNKX₂₉X₃₀X₃₁X₃₂X₃₃X₃₄X₃₅ | 552 |
| GYEVHHQX₁₆X₁₇X₁₈X₁₉X₂₀X₂₁X₂₂DVGSNKX₂₉X₃₀X₃₁X₃₂X₃₃X₃₄X₃₅ | 553 |
| YEVHHQX₁₆X₁₇X₁₈X₁₉X₂₀X₂₁X₂₂DVGSNKX₂₉X₃₀X₃₁X₃₂X₃₃X₃₄X₃₅ | 554 |
| EVHHQX₁₆X₁₇X₁₈X₁₉X₂₀X₂₁X₂₂DVGSNKX₂₉X₃₀X₃₁X₃₂X₃₃X₃₄X₃₅ | 555 |
| VHHQX₁₆X₁₇X₁₈X₁₉X₂₀X₂₁X₂₂DVGSNKX₂₉X₃₀X₃₁X₃₂X₃₃X₃₄X₃₅ | 556 |
| HHQX₁₆X₁₇X₁₈X₁₉X₂₀X₂₁X₂₂DVGSNKX₂₉X₃₀X₃₁X₃₂X₃₃X₃₄X₃₅ | 557 |
| HQX₁₆X₁₇X₁₈X₁₉X₂₀X₂₁X₂₂DVGSNKX₂₉X₃₀X₃₁X₃₂X₃₃X₃₄X₃₅ | 558 |
| QX₁₆X₁₇X₁₈X₁₉X₂₀X₂₁X₂₂DVGSNKX₂₉X₃₀X₃₁X₃₂X₃₃X₃₄X₃₅ | 559 |
| X₁₆X₁₇X₁₈X₁₉X₂₀X₂₁X₂₂DVGSNKX₂₉X₃₀X₃₁X₃₂X₃₃X₃₄X₃₅ | 560 |
| X₁₇X₁₈X₁₉X₂₀X₂₁X₂₂DVGSNKX₂₉X₃₀X₃₁X₃₂X₃₃X₃₄M | 561 |
| X₁₈X₁₉X₂₀X₂₁X₂₂DVGSNKX₂₉X₃₀X₃₁X₃₂X₃₃LM | 562 |
| X₁₉X₂₀X₂₁X₂₂DVGSNKX₂₉X₃₀X₃₁X₃₂GLM | 563 |
| X₂₀X₂₁X₂₂DVGSNKX₂₉X₃₀X₃₁IGLM | 564 |
| X₂₁X₂₂DVGSNKX₂₉X₃₀IIGLM | 565 |
| X₂₂DVGSNKX₂₉AIIGLM | 566 |
| DAEFRHDSGYEVHHQKX₁₇X₁₈X₁₉X₂₀X₂₁X₂₂DVGSNKX₂₉X₃₀X₃₁X₃₂X₃₃X₃₄ | 567 |
| AEFRHDSGYEVHHQKX₁₇X₁₈X₁₉X₂₀X₂₁X₂₂DVGSNKX₂₉X₃₀X₃₁X₃₂X₃₃X₃₄ | 568 |
| EFRHDSGYEVHHQKX₁₇X₁₈X₁₉X₂₀X₂₁X₂₂DVGSNKX₂₉X₃₀X₃₁X₃₂X₃₃X₃₄ | 569 |
| FRHDSGYEVHHQKX₁₇X₁₈X₁₉X₂₀X₂₁X₂₂DVGSNKX₂₉X₃₀X₃₁X₃₂X₃₃X₃₄ | 570 |
| RHDSGYEVHHQKX₁₇X₁₈X₁₉X₂₀X₂₁X₂₂DVGSNKX₂₉X₃₀X₃₁X₃₂X₃₃X₃₄ | 571 |
| HDSGYEVHHQKX₁₇X₁₈X₁₉X₂₀X₂₁X₂₂DVGSNKX₂₉X₃₀X₃₁X₃₂X₃₃X₃₄ | 572 |
| DSGYEVHHQKX₁₇X₁₈X₁₉X₂₀X₂₁X₂₂DVGSNKX₂₉X₃₀X₃₁X₃₂X₃₃X₃₄ | 573 |
| SGYEVHHQKX₁₇X₁₈X₁₉X₂₀X₂₁X₂₂DVGSNKX₂₉X₃₀X₃₁X₃₂X₃₃X₃₄ | 574 |
| GYEVHHQKX₁₇X₁₈X₁₉X₂₀X₂₁X₂₂DVGSNKX₂₉X₃₀X₃₁X₃₂X₃₃X₃₄ | 575 |
| YEVHHQKX₁₇X₁₈X₁₉X₂₀X₂₁X₂₂DVGSNKX₂₉X₃₀X₃₁X₃₂X₃₃X₃₄ | 576 |
| EVHHQKX₁₇X₁₈X₁₉X₂₀X₂₁X₂₂DVGSNKX₂₉X₃₀X₃₁X₃₂X₃₃X₃₄ | 577 |
| VHHQKX₁₇X₁₈X₁₉X₂₀X₂₁X₂₂DVGSNKX₂₉X₃₀X₃₁X₃₂X₃₃X₃₄ | 578 |
| HHQKX₁₇X₁₈X₁₉X₂₀X₂₁X₂₂DVGSNKX₂₉X₃₀X₃₁X₃₂X₃₃X₃₄ | 579 |
| HQKX₁₇X₁₈X₁₉X₂₀X₂₁X₂₂DVGSNKX₂₉X₃₀X₃₁X₃₂X₃₃X₃₄ | 580 |
| QKX₁₇X₁₈X₁₉X₂₀X₂₁X₂₂DVGSNKX₂₉X₃₀X₃₁X₃₂X₃₃X₃₄ | 581 |
| KX₁₇X₁₈X₁₉X₂₀X₂₁X₂₂DVGSNKX₂₉X₃₀X₃₁X₃₂X₃₃X₃₄ | 582 |
| X₁₇X₁₈X₁₉X₂₀X₂₁X₂₂DVGSNKX₂₉X₃₀X₃₁X₃₂X₃₃X₃₄ | 583 |
| X₁₈X₁₉X₂₀X₂₁X₂₂DVGSNKX₂₉X₃₀X₃₁X₃₂X₃₃L | 584 |
| X₁₉X₂₀X₂₁X₂₂DVGSNKX₂₉X₃₀X₃₁X₃₂GL | 585 |
| X₂₀X₂₁X₂₂DVGSNKX₂₉X₃₀X₃₁IGL | 586 |
| X₂₁X₂₂DVGSNKX₂₉X₃₀IIGL | 587 |
| X₂₂DVGSNKX₂₉AIIGL | 588 |
| DAEFRHDSGYEVHHQKLX₁₈X₁₉X₂₀X₂₁X₂₂DVGSNKX₂₉X₃₀X₃₁X₃₂X₃₃ | 589 |
| AEFRHDSGYEVHHQKLX₁₈X₁₉X₂₀X₂₁X₂₂DVGSNKX₂₉X₃₀X₃₁X₃₂X₃₃ | 590 |
| EFRHDSGYEVHHQKLX₁₈X₁₉X₂₀X₂₁X₂₂DVGSNKX₂₉X₃₀X₃₁X₃₂X₃₃ | 591 |
| FRHDSGYEVHHQKLX₁₈X₁₉X₂₀X₂₁X₂₂DVGSNKX₂₉X₃₀X₃₁X₃₂X₃₃ | 592 |
| RHDSGYEVHHQKLX₁₈X₁₉X₂₀X₂₁X₂₂DVGSNKX₂₉X₃₀X₃₁X₃₂X₃₃ | 593 |
| HDSGYEVHHQKLX₁₈X₁₉X₂₀X₂₁X₂₂DVGSNKX₂₉X₃₀X₃₁X₃₂X₃₃ | 594 |
| DSGYEVHHQKLX₁₈X₁₉X₂₀X₂₁X₂₂DVGSNKX₂₉X₃₀X₃₁X₃₂X₃₃ | 595 |
| SGYEVHHQKLX₁₈X₁₉X₂₀X₂₁X₂₂DVGSNKX₂₉X₃₀X₃₁X₃₂X₃₃ | 596 |
| GYEVHHQKLX₁₈X₁₉X₂₀X₂₁X₂₂DVGSNKX₂₉X₃₀X₃₁X₃₂X₃₃ | 597 |
| YEVHHQKLX₁₈X₁₉X₂₀X₂₁X₂₂DVGSNKX₂₉X₃₀X₃₁X₃₂X₃₃ | 598 |
| EVHHQKLX₁₈X₁₉X₂₀X₂₁X₂₂DVGSNKX₂₉X₃₀X₃₁X₃₂X₃₃ | 599 |
| VHHQKLX₁₈X₁₉X₂₀X₂₁X₂₂DVGSNKX₂₉X₃₀X₃₁X₃₂X₃₃ | 600 |
| HHQKLX₁₈X₁₉X₂₀X₂₁X₂₂DVGSNKX₂₉X₃₀X₃₁X₃₂X₃₃ | 601 |
| HQKLX₁₈X₁₉X₂₀X₂₁X₂₂DVGSNKX₂₉X₃₀X₃₁X₃₂X₃₃ | 602 |
| QKLX₁₈X₁₉X₂₀X₂₁X₂₂DVGSNKX₂₉X₃₀X₃₁X₃₂X₃₃ | 603 |
| KLX₁₈X₁₉X₂₀X₂₁X₂₂DVGSNKX₂₉X₃₀X₃₁X₃₂X₃₃ | 604 |
| LX₁₈X₁₉X₂₀X₂₁X₂₂DVGSNKX₂₉X₃₀X₃₁X₃₂X₃₃ | 605 |
| X₁₈X₁₉X₂₀X₂₁X₂₂DVGSNKX₂₉X₃₀X₃₁X₃₂X₃₃ | 606 |
| X₁₉X₂₀X₂₁X₂₂DVGSNKX₂₉X₃₀X₃₁X₃₂G | 607 |
| X₂₀X₂₁X₂₂DVGSNKX₂₉X₃₀X₃₁IG | 608 |
| X₂₁X₂₂DVGSNKX₂₉X₃₀IIG | 609 |
| X₂₂DVGSNKX₂₉AIIG | 610 |
| DAEFRHDSGYEVHHQKLVX₁₉X₂₀X₂₁X₂₂DVGSNKX₂₉X₃₀X₃₁X₃₂ | 611 |
| AEFRHDSGYEVHHQKLVX₁₉X₂₀X₂₁X₂₂DVGSNKX₂₉X₃₀X₃₁X₃₂ | 612 |
| EFRHDSGYEVHHQKLVX₁₉X₂₀X₂₁X₂₂DVGSNKX₂₉X₃₀X₃₁X₃₂ | 613 |
| FRHDSGYEVHHQKLVX₁₉X₂₀X₂₁X₂₂DVGSNKX₂₉X₃₀X₃₁X₃₂ | 614 |
| RHDSGYEVHHQKLVX₁₉X₂₀X₂₁X₂₂DVGSNKX₂₉X₃₀X₃₁X₃₂ | 615 |
| HDSGYEVHHQKLVX₁₉X₂₀X₂₁X₂₂DVGSNKX₂₉X₃₀X₃₁X₃₂ | 616 |
| DSGYEVHHQKLVX₁₉X₂₀X₂₁X₂₂DVGSNKX₂₉X₃₀X₃₁X₃₂ | 617 |
| SGYEVHHQKLVX₁₉X₂₀X₂₁X₂₂DVGSNKX₂₉X₃₀X₃₁X₃₂ | 618 |
| GYEVHHQKLVX₁₉X₂₀X₂₁X₂₂DVGSNKX₂₉X₃₀X₃₁X₃₂ | 619 |
| YEVHHQKLVX₁₉X₂₀X₂₁X₂₂DVGSNKX₂₉X₃₀X₃₁X₃₂ | 620 |
| EVHHQKLVX₁₉X₂₀X₂₁X₂₂DVGSNKX₂₉X₃₀X₃₁X₃₂ | 621 |
| VHHQKLVX₁₉X₂₀X₂₁X₂₂DVGSNKX₂₉X₃₀X₃₁X₃₂ | 622 |
| HHQKLVX₁₉X₂₀X₂₁X₂₂DVGSNKX₂₉X₃₀X₃₁X₃₂ | 623 |
| HQKLVX₁₉X₂₀X₂₁X₂₂DVGSNKX₂₉X₃₀X₃₁X₃₂ | 624 |
| QKLVX₁₉X₂₀X₂₁X₂₂DVGSNKX₂₉X₃₀X₃₁X₃₂ | 625 |
| KLVX₁₉X₂₀X₂₁X₂₂DVGSNKX₂₉X₃₀X₃₁X₃₂ | 626 |
| LVX₁₉X₂₀X₂₁X₂₂DVGSNKX₂₉X₃₀X₃₁X₃₂ | 627 |
| VX₁₉X₂₀X₂₁X₂₂DVGSNKX₂₉X₃₀X₃₁X₃₂ | 628 |
| X₁₉X₂₀X₂₁X₂₂DVGSNKX₂₉X₃₀X₃₁X₃₂ | 629 |
| X₂₀X₂₁X₂₂DVGSNKX₂₉X₃₀X₃₁I | 630 |
| X₂₁X₂₂DVGSNKX₂₉X₃₀II | 631 |
| X₂₂DVGSNKX₂₉AII | 632 |
| DAEFRHDSGYEVHHQKLVFX₂₀X₂₁X₂₂DVGSNKX₂₉X₃₀X₃₁ | 633 |
| AEFRHDSGYEVHHQKLVFX₂₀X₂₁X₂₂DVGSNKX₂₉X₃₀X₃₁ | 634 |
| EFRHDSGYEVHHQKLVFX₂₀X₂₁X₂₂DVGSNKX₂₉X₃₀X₃₁ | 635 |
| FRHDSGYEVHHQKLVFX₂₀X₂₁X₂₂DVGSNKX₂₉X₃₀X₃₁ | 636 |
| RHDSGYEVHHQKLVFX₂₀X₂₁X₂₂DVGSNKX₂₉X₃₀X₃₁ | 637 |
| HDSGYEVHHQKLVFX₂₀X₂₁X₂₂DVGSNKX₂₉X₃₀X₃₁ | 638 |
| DSGYEVHHQKLVFX₂₀X₂₁X₂₂DVGSNKX₂₉X₃₀X₃₁ | 639 |
| SGYEVHHQKLVFX₂₀X₂₁X₂₂DVGSNKX₂₉X₃₀X₃₁ | 640 |
| GYEVHHQKLVFX₂₀X₂₁X₂₂DVGSNKX₂₉X₃₀X₃₁ | 641 |
| YEVHHQKLVFX₂₀X₂₁X₂₂DVGSNKX₂₉X₃₀X₃₁ | 642 |
| EVHHQKLVFX₂₀X₂₁X₂₂DVGSNKX₂₉X₃₀X₃₁ | 643 |
| VHHQKLVFX₂₀X₂₁X₂₂DVGSNKX₂₉X₃₀X₃₁ | 644 |
| HHQKLVFX₂₀X₂₁X₂₂DVGSNKX₂₉X₃₀X₃₁ | 645 |
| HQKLVFX₂₀X₂₁X₂₂DVGSNKX₂₉X₃₀X₃₁ | 646 |
| QKLVFX₂₀X₂₁X₂₂DVGSNKX₂₉X₃₀X₃₁ | 647 |
| KLVFX₂₀X₂₁X₂₂DVGSNKX₂₉X₃₀X₃₁ | 648 |
| LVFX₂₀X₂₁X₂₂DVGSNKX₂₉X₃₀X₃₁ | 649 |
| VFX₂₀X₂₁X₂₂DVGSNKX₂₉X₃₀X₃₁ | 650 |
| FX₂₀X₂₁X₂₂DVGSNKX₂₉X₃₀X₃₁ | 651 |
| X₂₀X₂₁X₂₂DVGSNKX₂₉X₃₀X₃₁ | 652 |
| X₂₁X₂₂DVGSNKX₂₉X₃₀I | 653 |
| X₂₂DVGSNKX₂₉AI | 654 |
| DAEFRHDSGYEVHHQKLVFFX₂₁X₂₂DVGSNKX₂₉X₃₀ | 655 |
| AEFRHDSGYEVHHQKLVFFX₂₁X₂₂DVGSNKX₂₉X₃₀ | 656 |
| EFRHDSGYEVHHQKLVFFX₂₁X₂₂DVGSNKX₂₉X₃₀ | 657 |
| FRHDSGYEVHHQKLVFFX₂₁X₂₂DVGSNKX₂₉X₃₀ | 658 |
| RHDSGYEVHHQKLVFFX₂₁X₂₂DVGSNKX₂₉X₃₀ | 659 |
| HDSGYEVHHQKLVFFX₂₁X₂₂DVGSNKX₂₉X₃₀ | 660 |
| DSGYEVHHQKLVFFX₂₁X₂₂DVGSNKX₂₉X₃₀ | 661 |
| SGYEVHHQKLVFFX₂₁X₂₂DVGSNKX₂₉X₃₀ | 662 |
| GYEVHHQKLVFFX₂₁X₂₂DVGSNKX₂₉X₃₀ | 663 |
| YEVHHQKLVFFX₂₁X₂₂DVGSNKX₂₉X₃₀ | 664 |
| EVHHQKLVFFX₂₁X₂₂DVGSNKX₂₉X₃₀ | 665 |
| VHHQKLVFFX₂₁X₂₂DVGSNKX₂₉X₃₀ | 666 |
| HHQKLVFFX₂₁X₂₂DVGSNKX₂₉X₃₀ | 667 |
| HQKLVFFX₂₁X₂₂DVGSNKX₂₉X₃₀ | 668 |
| QKLVFFX₂₁X₂₂DVGSNKX₂₉X₃₀ | 669 |
| KLVFFX₂₁X₂₂DVGSNKX₂₉X₃₀ | 670 |
| LVFFX₂₁X₂₂DVGSNKX₂₉X₃₀ | 671 |
| VFFX₂₁X₂₂DVGSNKX₂₉X₃₀ | 672 |
| FFX₂₁X₂₂DVGSNKX₂₉X₃₀ | 673 |
| FX₂₁X₂₂DVGSNKX₂₉X₃₀ | 674 |
| X₂₁X₂₂DVGSNKX₂₉X₃₀ | 675 |
| X₂₂DVGSNKX₂₉A | 676 |
| DAEFRHDSGYEVHHQKLVFFAX₂₂DVGSNKX₂₉ | 677 |
| AEFRHDSGYEVHHQKLVFFAX₂₂DVGSNKX₂₉ | 678 |
| EFRHDSGYEVHHQKLVFFAX₂₂DVGSNKX₂₉ | 679 |
| FRHDSGYEVHHQKLVFFAX₂₂DVGSNKX₂₉ | 680 |
| RHDSGYEVHHQKLVFFAX₂₂DVGSNKX₂₉ | 681 |
| HDSGYEVHHQKLVFFAX₂₂DVGSNKX₂₉ | 682 |
| DSGYEVHHQKLVFFAX₂₂DVGSNKX₂₉ | 683 |
| SGYEVHHQKLVFFAX₂₂DVGSNKX₂₉ | 684 |
| GYEVHHQKLVFFAX₂₂DVGSNKX₂₉ | 685 |
| YEVHHQKLVFFAX₂₂DVGSNKX₂₉ | 686 |
| EVHHQKLVFFAX₂₂DVGSNKX₂₉ | 687 |
| VHHQKLVFFAX₂₂DVGSNKX₂₉ | 688 |
| HHQKLVFFAX₂₂DVGSNKX₂₉ | 689 |
| HQKLVFFAX₂₂DVGSNKX₂₉ | 690 |
| QKLVFFAX₂₂DVGSNKX₂₉ | 691 |
| KLVFFAX₂₂DVGSNKX₂₉ | 692 |
| LVFFAX₂₂DVGSNKX₂₉ | 693 |
| VFFAX₂₂DVGSNKX₂₉ | 694 |
| FFAX₂₂DVGSNKX₂₉ | 695 |
| FAX₂₂DVGSNKX₂₉ | 696 |
| AX₂₂DVGSNKX₂₉ | 697 |
| X₂₂DVGSNKX₂₉ | 698 |

[0137] Said intra-sequence covalent linkage(s) is (are) intended to stabilize the loop and optionally further secondary structure elements of the amyloid β peptide analogues of the invention, as described. Accordingly, the covalently linked amino acid residues are expediently separated by at least the loop-forming amino acids, for instance the sequence VGSN, DVGSN, VGSNK, or Q as described herein. Particularly preferred positions of the intra-sequence covalent linkages in SEQ ID NO: 369-698 may be described in the form of the following embodiments:

At least one amino acid residue selected from the group consisting of X₁₂, X₁₃, X₁₄ and at least one amino acid residue selected from the group consisting of X₃₇, X₃₈, X₃₉ are covalently linked with each other.

[0138] At least one amino acid residue selected from the group consisting of X₁₃, X₁₄, X₁₅ and at least one amino acid residue selected from the group consisting of X₃₆, X₃₇, X₃₈ are covalently linked with each other.

[0139] At least one amino acid residue selected from the group consisting of X₁₄, X₁₅, X₁₆ and at least one amino acid residue selected from the group consisting of X₃₅, X₃₆, X₃₇ are covalently linked with each other.

[0140] At least one amino acid residue selected from the group consisting of X₁₅, X₁₆, X₁₇ and at least one amino acid residue selected from the group consisting of X₃₄, X₃₅, X₃₆ are covalently linked with each other.

[0141] At least one amino acid residue selected from the group consisting of X₁₆, X₁₇, X₁₈ and at least one amino acid residue selected from the group consisting of X₃₃, X₃₄, X₃₅ are covalently linked with each other.

[0142] At least one amino acid residue selected from the group consisting of X₁₇, X₁₈, X₁₉ and at least one amino acid residue selected from the group consisting of X₃₂, X₃₃, X₃₄ are covalently linked with each other.

[0143] At least one amino acid residue selected from the group consisting of X₁₈, X₁₉, X₂₀ and at least one amino acid residue selected from the group consisting of X₃₁, X₃₂, X₃₃ are covalently linked with each other.

[0144] At least one amino acid residue selected from the group consisting of X₁₉, X₂₀, X₂₁ and at least one amino acid residue selected from the group consisting of X₃₀, X₃₁, X₃₂ are covalently linked with each other.

[0145] At least one amino acid residue selected from the group consisting of X₂₀, X₂₁ and X₂₂ and at least one amino acid residue selected from the group consisting of X₂₉, X₃₀, X₃₁ are covalently linked with each other.

[0146] More particularly, the amino acid residues X₁₂ and X₃₉, X₁₃ and X₃₈, X₁₄ and X₃₇, X₁₅ and X₃₆, X₁₆ and X₃₅, X₁₇ and X₃₄, X₁₈ and X₃₃, X₁₉ and X₃₂, X₂₀ and X₃₁, X₂₁ and X₃₀, or X₂₂ and X₂₉ may expediently covalently linked with each other.

[0147] According to a further embodiment of the invention, the amino acid sequence of the amyloid β peptide analogues of the invention comprises the sequence X₂₀A₂₁E₂₂D₂₃-X₂₄X₂₅X₂₆X₂₇X₂₈X₂₀X₃₀X₃₁, wherein each of X₂₀, X₂₄, X₂₅, X₂₆, X₂₇, X₂₈, X₂₉, X₃₀, X₃₁ independently represents an amino acid, in particular as defined herein. Each of said amino acids may be covalently linked with another amino acid, with the other amino acid being selected among X₂₀, X₂₄, X₂₅, X₂₆, X₂₇, X₂₈, X₂₉, X₃₀, X₃₁, or representing a different amino acid. Preferably, the amino acid sequences X₂₀A₂₁E₂₂D₂₃ and X₂₈X₂₉X₃₀X₃₁ are in anti-parallel orientation.

[0148] Particular amyloid β peptide analogues of the invention include those wherein

X₂₀ is an amino acid residue selected from the group consisting of phenylalanine, tyrosine, valine, leucine, isoleucine, and methionine, with phenylalanine being preferred;
X₂₄ is an amino acid residue selected from the group consisting of valine, leucine, isoleucine, alanine, and methionine, with valine being preferred;
X₂₅ is an amino acid residue selected from the group consisting of glycine, alanine, and serine, with glycine being preferred;
X₂₆ is an amino acid residue selected from the group consisting of serine, glycine, alanine, and threonine, with serine being preferred;
X₂₇ is an amino acid residue selected from the group consisting of asparagine, glutamine, and methionine, with asparagine being preferred;
X₂₈ is an amino acid residue selected from the group consisting of lysine and arginine, with lysine being preferred;
X₂₉ is an amino acid residue selected from the group consisting of glycine, alanine, and serine, with glycine being preferred;
X₃₀ is an amino acid residue selected from the group consisting of alanine, valine, glycine, and serine, with alanine being preferred;
X₃₁ is an amino acid residue selected from the group consisting of isoleucine, leucine, valine, phenylalanine, and methionine, with isoleucine being preferred;
or any combination thereof.

[0149] Further particular amyloid β peptide analogues of the invention include those wherein the amino acid sequence of the amyloid β peptide analogue comprises the sequence X₂₀-Q-X₂₄X₂₅X₂₆X₂₇X₂₈X₂₉A₃₀I₃₁, with each of X₂₀, X₂₄, X₂₅, X₂₆, X₂₇, X₂₈, X₂₉, independently representing an amino acid, in particular as defined herein, and Q being an amino acid sequence comprising the sequence AED.

[0150] The amino acid sequence Q usually consists of 3, 4, 5, or 6 amino acid residues. According to a particular embodiment, at least part of the amino acid sequence X₂₄X₂₅X₂₆X₂₇ forms the loop.

[0151] Amyloid β peptide analogues comprising the sequence X₂₀A₂₁E₂₂D₂₃X₂₄X₂₅X₂₆X₂₇X₂₈X₂₉A₃₀I₃₁, wherein each of X₂₀, X₂₄, X₂₅, X₂₆, X₂₇, X₂₈, X₂₉, independently represents an amino acid residue, in particular as defined herein, represent a preferred embodiment of the invention. In these amyloid β peptide analogues, at least three contiguous amino acids of the amino acid sequences X₂₀A₂₁E₂₂D₂₃ and X₂₈X₂₉A₃₀I₃₁ are preferably in anti-parallel orientation. More particularly, it is preferred if the interproton distance for at least one atom pair selected from the group consisting of A₂₁ (NH)-A₃₀(NH), A₂₁(NH)-A₃₀(CB), A₂₁(NH)—I₃₁(CD1), A₂₁(NH)—I₃₁(CG2), and A₃₀(NH)-A₂₁(CB) is 1.8 to 6.5 Angstroms. It is also preferred if the atom pairs A₂₁(CO)-A₃₀(N) and A₃₀(CO)-A₂₁(N) are at a distance of 3.3±0.5 Å, wherein CO indicates the backbone oxygen atom, and the phi (φ) angles of the residues range from −180 to −30 and psi (ψ) angles of the residues range from approximately 60 to 180 or from approximately −180 to −150.

[0152] According to a further particular embodiment, the amino acid sequence of the amyloid β peptide analogue is a sequence selected from the group consisting of SEQ ID NO: 699-960, wherein
[0153] X₁₂ is valine, leucine, isoleucine, alanine, methionine, or an amino acid residue which is covalently linked to another amino acid residue of the sequence;
[0154] X₁₃ is histidine, tyrosine, serine, methionine, or an amino acid residue which is covalently linked to another amino acid residue of the sequence;
[0155] X₁₄ is histidine, tyrosine, serine, methionine, or an amino acid residue which is covalently linked to another amino acid residue of the sequence;
[0156] X₁₅ is glutamine, asparagine, methionine, serine, or an amino acid residue which is covalently linked to another amino acid residue of the sequence;
[0157] X₁₆ is lysine, arginine, or an amino acid residue which is covalently linked to another amino acid residue of the sequence;
[0158] X₁₇ is leucine, isoleucine, valine, phenylalanine, methionine, or an amino acid residue which is covalently linked to another amino acid residue of the sequence;
[0159] X₁₈ is valine, leucine, isoleucine, alanine, methionine, or an amino acid residue which is covalently linked to another amino acid residue of the sequence
[0160] X₁₉ is phenylalanine, tyrosine, valine, leucine, isoleucine, methionine, or an amino acid residue which is covalently linked to another amino acid residue of the sequence;
[0161] X₂₀ is phenylalanine, tyrosine, valine, leucine, isoleucine, methionine, or an amino acid residue which is covalently linked to another amino acid residue of the sequence;
[0162] X₂₄ is valine, leucine, isoleucine, alanine, methionine, or an amino acid residue which is covalently linked to another amino acid residue of the sequence;
[0163] X₂₅ is glycine, alanine, serine, or an amino acid residue which is covalently linked to another amino acid residue of the sequence;
[0164] X₂₆ is serine, glycine, alanine, threonine, or an amino acid residue which is covalently linked to another amino acid residue of the sequence;
[0165] X₂₇ is asparagine, glutamine, methionine, or an amino acid residue which is covalently linked to another amino acid residue of the sequence;
[0166] X₂₈ is lysine, arginine, or an amino acid residue which is covalently linked to another amino acid residue of the sequence;
[0167] X₂₉ is glycine, alanine, serine, or an amino acid residue which is covalently linked to another amino acid residue of the sequence;
[0168] X₃₀ is alanine, valine, glycine, serine, or an amino acid residue which is covalently linked to another amino acid residue of the sequence;
[0169] X₃₁ is isoleucine, leucine, valine, phenylalanine, methionine, or an amino acid residue which is covalently linked to another amino acid residue of the sequence;
[0170] X₃₂ is isoleucine, leucine, valine, phenylalanine, methionine, or an amino acid residue which is covalently linked to another amino acid residue of the sequence;
[0171] X₃₃ is glycine, alanine, serine, or an amino acid residue which is covalently linked to another amino acid residue of the sequence;
[0172] X₃₄ is leucine, isoleucine, valine, phenylalanine, methionine, or an amino acid residue which is covalently linked to another amino acid residue of the sequence;
[0173] X₃₅ is methionine, valine, leucine, isoleucine, alanine, or an amino acid residue which is covalently linked to another amino acid residue of the sequence;
[0174] X₃₆ is valine, leucine, isoleucine, alanine, methionine, or an amino acid residue which is covalently linked to another amino acid residue of the sequence;
[0175] X₃₇ is glycine, alanine, serine, or an amino acid residue which is covalently linked to another amino acid residue of the sequence;
[0176] X₃₈ is glycine, alanine, serine, or an amino acid residue which is covalently linked to another amino acid residue of the sequence; and
[0177] X₃₉ is valine, leucine, isoleucine, alanine, methionine, or an amino acid residue which is covalently linked to another amino acid residue of the sequence,
   at least one amino acid residue selected from the group consisting of X₁₂, X₁₃, X₁₄, X₁₅, X₁₆, X₁₇, X₁₈, X₁₉, X₂₀, and at least one amino acid residue selected from the group consisting of X₂₉, X₃₀, X₃₁, X₃₂, X₃₃, X₃₄, X₃₅, X₃₆, X₃₇, X₃₈ and X₃₉ being covalently linked with other.

| Sequence | |
|---|---|
| DAEFRHDSGYEX₁₂X₁₃X₁₄X₁₅X₁₆X₁₇X₁₈X₁₉X₂₀AEDX₂₄X₂₅X₂₆X₂₇X₂₈X₂₉X₃₀X₃₁X₃₂X₃₃X₃₄X₃₅X₃₆X₃₇X₃₈X₃₉VIAT | 699 |
| AEFRHDSGYEX₁₂X₁₃X₁₄X₁₅X₁₆X₁₇X₁₈X₁₉X₂₀AEDX₂₄X₂₅X₂₆X₂₇X₂₈X₂₉X₃₀X₃₁X₃₂X₃₃X₃₄X₃₅X₃₆X₃₇X₃₈X₃₉VIAT | 701 |
| EFRHDSGYEX₁₂X₁₃X₁₄X₁₅X₁₆X₁₇X₁₈X₁₉X₂₀AEDX₂₄X₂₅X₂₆X₂₇X₂₈X₂₉X₃₀X₃₁X₃₂X₃₃X₃₄X₃₅X₃₆X₃₇X₃₈X₃₉VIAT | 702 |
| FRHDSGYEX₁₂X₁₃X₁₄X₁₅X₁₆X₁₇X₁₈X₁₉X₂₀AEDX₂₄X₂₅X₂₆X₂₇X₂₈X₂₉X₃₀X₃₁X₃₂X₃₃X₃₄X₃₅X₃₆X₃₇X₃₈X₃₉VIAT | 703 |
| RHDSGYEX₁₂X₁₃X₁₄X₁₅X₁₆X₁₇X₁₈X₁₉X₂₀AEDX₂₄X₂₅X₂₆X₂₇X₂₈X₂₉X₃₀X₃₁X₃₂X₃₃X₃₄X₃₅X₃₆X₃₇X₃₈X₃₉VIAT | 704 |
| HDSGYEX₁₂X₁₃X₁₄X₁₅X₁₆X₁₇X₁₈X₁₉X₂₀AEDX₂₄X₂₅X₂₆X₂₇X₂₈X₂₉X₃₀X₃₁X₃₂X₃₃X₃₄X₃₅X₃₆X₃₇X₃₈X₃₉VIAT | 705 |
| DSGYEX₁₂X₁₃X₁₄X₁₅X₁₆X₁₇X₁₈X₁₉X₂₀AEDX₂₄X₂₅X₂₆X₂₇X₂₈X₂₉X₃₀X₃₁X₃₂X₃₃X₃₄X₃₅X₃₆X₃₇X₃₈X₃₉VIAT | 706 |
| SGYEX₁₂X₁₃X₁₄X₁₅X₁₆X₁₇X₁₈X₁₉X₂₀AEDX₂₄X₂₅X₂₆X₂₇X₂₈X₂₉X₃₀X₃₁X₃₂X₃₃X₃₄X₃₅X₃₆X₃₇X₃₈X₃₉VIAT | 707 |
| GYEX₁₂X₁₃X₁₄X₁₅X₁₆X₁₇X₁₈X₁₉X₂₀AEDX₂₄X₂₅X₂₆X₂₇X₂₈X₂₉X₃₀X₃₁X₃₂X₃₃X₃₄X₃₅X₃₆X₃₇X₃₈X₃₉VIAT | 708 |
| YEX₁₂X₁₃X₁₄X₁₅X₁₆X₁₇X₁₈X₁₉X₂₀AEDX₂₄X₂₅X₂₆X₂₇X₂₈X₂₉X₃₀X₃₁X₃₂X₃₃X₃₄X₃₅X₃₆X₃₇X₃₈X₃₉VIAT | 709 |
| EX₁₂X₁₃X₁₄X₁₅X₁₆X₁₇X₁₈X₁₉X₂₀AEDX₂₄X₂₅X₂₆X₂₇X₂₈X₂₉X₃₀X₃₁X₃₂X₃₃X₃₄X₃₅X₃₆X₃₇X₃₈X₃₉VIAT | 710 |
| X₁₂X₁₃X₁₄X₁₅X₁₆X₁₇X₁₈X₁₉X₂₀AEDX₂₄X₂₅X₂₆X₂₇X₂₈X₂₉X₃₀X₃₁X₃₂X₃₃X₃₄X₃₅X₃₆X₃₇X₃₈X₃₉VIAT | 711 |
| X₁₃X₁₄X₁₅X₁₆X₁₇X₁₈X₁₉X₂₀AEDX₂₄X₂₅X₂₆X₂₇X₂₈X₂₉X₃₀X₃₁X₃₂X₃₃X₃₄X₃₅X₃₆X₃₇X₃₈VVIAT | 712 |
| X₁₄X₁₅X₁₆X₁₇X₁₈X₁₉X₂₀AEDX₂₄X₂₅X₂₆X₂₇X₂₈X₂₉X₃₀X₃₁X₃₂X₃₃X₃₄X₃₅X₃₆X₃₇GVVIAT | 713 |
| X₁₅X₁₆X₁₇X₁₈X₁₉X₂₀AEDX₂₄X₂₅X₂₆X₂₇X₂₈X₂₉X₃₀X₃₁X₃₂X₃₃X₃₄X₃₅X₃₆GGVVIAT | 714 |
| X₁₆X₁₇X₁₈X₁₉X₂₀AEDX₂₄X₂₅X₂₆X₂₇X₂₈X₂₉X₃₀X₃₁X₃₂X₃₃X₃₄X₃₅VGGVV1AT | 715 |
| X₁₇X₁₈X₁₉X₂₀AEDX₂₄X₂₅X₂₆X₂₇X₂₈X₂₉X₃₀X₃₁X₃₂X₃₃X₃₄MVGGVV1AT | 716 |
| X₁₈X₁₉X₂₀AEDX₂₄X₂₅X₂₆X₂₇X₂₈X₂₉X₃₀X₃₁X₃₂X₃₃LMVGGVVIAT | 717 |
| X₁₉X₂₀AEDX₂₄X₂₅X₂₆X₂₇X₂₈X₂₉X₃₀X₃₁X₃₂GLMVGGVVIAT | 718 |
| X₂₀AEDX₂₄X₂₅X₂₆X₂₇X₂₈X₂₉X₃₀X₃₁IGLMVGGVVIAT | 719 |
| DAEFRHDSGYEX₁₂X₁₃X₁₄X₁₅X₁₆X₁₇X₁₈X₁₉X₂₀AEDX₂₄X₂₅X₂₆X₂₇X₂₈X₂₉X₃₀X₃₁X₃₂X₃₃X₃₄X₃₅X₃₆X₃₇X₃₈X₃₉VIA | 720 |
| AEFRHDSGYEX₁₂X₁₃X₁₄X₁₅X₁₆X₁₇X₁₈X₁₉X₂₀AEDX₂₄X₂₅X₂₆X₂₇X₂₈X₂₉X₃₀X₃₁X₃₂X₃₃X₃₄X₃₅X₃₆X₃₇X₃₈X₃₉VIA | 721 |
| EFRHDSGYEX₁₂X₁₃X₁₄X₁₅X₁₆X₁₇X₁₈X₁₉X₂₀AEDX₂₄X₂₅X₂₆X₂₇X₂₈X₂₉X₃₀X₃₁X₃₂X₃₃X₃₄X₃₅X₃₆X₃₇X₃₈X₃₉VIA | 722 |
| FRHDSGYEX₁₂X₁₃X₁₄X₁₅X₁₆X₁₇X₁₈X₁₉X₂₀AEDX₂₄X₂₅X₂₆X₂₇X₂₈X₂₉X₃₀X₃₁X₃₂X₃₃X₃₄X₃₅X₃₆X₃₇X₃₈X₃₉VIA | 723 |
| RHDSGYEX₁₂X₁₃X₁₄X₁₅X₁₆X₁₇X₁₈X₁₉X₂₀AEDX₂₄X₂₅X₂₆X₂₇X₂₈X₂₉X₃₀X₃₁X₃₂X₃₃X₃₄X₃₅X₃₆X₃₇X₃₈X₃₉VIA | 724 |
| HDSGYEX₁₂X₁₃X₁₄X₁₅X₁₆X₁₇X₁₈X₁₉X₂₀AEDX₂₄X₂₅X₂₆X₂₇X₂₈X₂₉X₃₀X₃₁X₃₂X₃₃X₃₄X₃₅X₃₆X₃₇X₃₈X₃₉VIA | 725 |
| DSGYEX₁₂X₁₃X₁₄X₁₅X₁₆X₁₇X₁₈X₁₉X₂₀AEDX₂₄X₂₅X₂₆X₂₇X₂₈X₂₉X₃₀X₃₁X₃₂X₃₃X₃₄X₃₅X₃₆X₃₇X₃₈X₃₉VIA | 726 |
| SGYEX₁₂X₁₃X₁₄X₁₅X₁₆X₁₇X₁₈X₁₉X₂₀AEDX₂₄X₂₅X₂₆X₂₇X₂₈X₂₉X₃₀X₃₁X₃₂X₃₃X₃₄X₃₅X₃₆X₃₇X₃₈X₃₉VIA | 727 |
| GYEX₁₂X₁₃X₁₄X₁₅X₁₆X₁₇X₁₈X₁₉X₂₀AEDX₂₄X₂₅X₂₆X₂₇X₂₈X₂₉X₃₀X₃₁X₃₂X₃₃X₃₄X₃₅X₃₆X₃₇X₃₈X₃₉VIA | 728 |
| YEX₁₂X₁₃X₁₄X₁₅X₁₆X₁₇X₁₈X₁₉X₂₀AEDX₂₄X₂₅X₂₆X₂₇X₂₈X₂₉X₃₀X₃₁X₃₂X₃₃X₃₄X₃₅X₃₆X₃₇X₃₈X₃₉VIA | 729 |
| EX₁₂X₁₃X₁₄X₁₅X₁₆X₁₇X₁₈X₁₉X₂₀AEDX₂₄X₂₅X₂₆X₂₇X₂₈X₂₉X₃₀X₃₁X₃₂X₃₃X₃₄X₃₅X₃₆X₃₇X₃₈X₃₉VIA | 730 |
| X₁₂X₁₃X₁₄X₁₅X₁₆X₁₇X₁₈X₁₉X₂₀AEDX₂₄X₂₅X₂₆X₂₇X₂₈X₂₉X₃₀X₃₁X₃₂X₃₃X₃₄X₃₅X₃₆X₃₇X₃₈X₃₉VIA | 731 |
| X₁₃X₁₄X₁₅X₁₆X₁₇X₁₈X₁₉X₂₀AEDX₂₄X₂₅X₂₆X₂₇X₂₈X₂₉X₃₀X₃₁X₃₂X₃₃X₃₄X₃₅X₃₆X₃₇X₃₈VVIA | 732 |
| X₁₄X₁₅X₁₆X₁₇X₁₈X₁₉X₂₀AEDX₂₄X₂₅X₂₆X₂₇X₂₈X₂₉X₃₀X₃₁X₃₂X₃₃X₃₄X₃₅X₃₆X₃₇GVVIA | 733 |
| X₁₅X₁₆X₁₇X₁₈X₁₉X₂₀AEDX₂₄X₂₅X₂₆X₂₇X₂₈X₂₉X₃₀X₃₁X₃₂X₃₃X₃₄X₃₅X₃₆GGVVIA | 734 |
| X₁₆X₁₇X₁₈X₁₉X₂₀AEDX₂₄X₂₅X₂₆X₂₇X₂₈X₂₉X₃₀X₃₁X₃₂X₃₃X₃₄X₃₅VGGVVIA | 735 |
| X₁₇X₁₈X₁₉X₂₀AEDX₂₄X₂₅X₂₆X₂₇X₂₈X₂₉X₃₀X₃₁X₃₂X₃₃X₃₄MVGGVVIA | 736 |
| X₁₈X₁₉X₂₀AEDX₂₄X₂₅X₂₆X₂₇X₂₈X₂₉X₃₀X₃₁X₃₂X₃₃LMVGGVVIA | 737 |
| X₁₉X₂₀AEDX₂₄X₂₅X₂₆X₂₇X₂₈X₂₉X₃₀X₃₁X₃₂GLMVGGVVIA | 738 |
| X₂₀AEDX₂₄X₂₅X₂₆X₂₇X₂₈X₂₉X₃₀X₃₁IGLMVGGVVIA | 739 |
| DAEFRHDSGYEX₁₂X₁₃X₁₄X₁₅X₁₆X₁₇X₁₈X₁₉X₂₀AEDX₂₄X₂₅X₂₆X₂₇X₂₈X₂₉X₃₀X₃₁X₃₂X₃₃X₃₄X₃₅X₃₆X₃₇X₃₈X₃₉VI | 740 |
| AEFRHDSGYEX₁₂X₁₃X₁₄X₁₅X₁₆X₁₇X₁₈X₁₉X₂₀AEDX₂₄X₂₅X₂₆X₂₇X₂₈X₂₉X₃₀X₃₁X₃₂X₃₃X₃₄X₃₅X₃₆X₃₇X₃₈X₃₉VI | 741 |
| EFRHDSGYEX₁₂X₁₃X₁₄X₁₅X₁₆X₁₇X₁₈X₁₉X₂₀AEDX₂₄X₂₅X₂₆X₂₇X₂₈X₂₉X₃₀X₃₁X₃₂X₃₃X₃₄X₃₅X₃₆X₃₇X₃₈X₃₉VI | 742 |
| FRHDSGYEX₁₂X₁₃X₁₄X₁₅X₁₆X₁₇X₁₈X₁₉X₂₀AEDX₂₄X₂₅X₂₆X₂₇X₂₈X₂₉X₃₀X₃₁X₃₂X₃₃X₃₄X₃₅X₃₆X₃₇X₃₈X₃₉VI | 743 |
| RHDSGYEX₁₂X₁₃X₁₄X₁₅X₁₆X₁₇X₁₈X₁₉X₂₀AEDX₂₄X₂₅X₂₆X₂₇X₂₈X₂₉X₃₀X₃₁X₃₂X₃₃X₃₄X₃₅X₃₆X₃₇X₃₈X₃₉VI | 744 |
| HDSGYEX₁₂X₁₃X₁₄X₁₅X₁₆X₁₇X₁₈X₁₉X₂₀AEDX₂₄X₂₅X₂₆X₂₇X₂₈X₂₉X₃₀X₃₁X₃₂X₃₃X₃₄X₃₅X₃₆X₃₇X₃₈X₃₉VI | 745 |
| DSGYEX₁₂X₁₃X₁₄X₁₅X₁₆X₁₇X₁₈X₁₉X₂₀AEDX₂₄X₂₅X₂₆X₂₇X₂₈X₂₉X₃₀X₃₁X₃₂X₃₃X₃₄X₃₅X₃₆X₃₇X₃₈X₃₉VI | 746 |
| SGYEX₁₂X₁₃X₁₄X₁₅X₁₆X₁₇X₁₈X₁₉X₂₀AEDX₂₄X₂₅X₂₆X₂₇X₂₈X₂₉X₃₀X₃₁X₃₂X₃₃X₃₄X₃₅X₃₆X₃₇X₃₈X₃₉VI | 747 |
| GYEX₁₂X₁₃X₁₄X₁₅X₁₆X₁₇X₁₈X₁₉X₂₀AEDX₂₄X₂₅X₂₆X₂₇X₂₈X₂₉X₃₀X₃₁X₃₂X₃₃X₃₄X₃₅X₃₆X₃₇X₃₈X₃₉VI | 748 |
| YEX₁₂X₁₃X₁₄X₁₅X₁₆X₁₇X₁₈X₁₉X₂₀AEDX₂₄X₂₅X₂₆X₂₇X₂₈X₂₉X₃₀X₃₁X₃₂X₃₃X₃₄X₃₅X₃₆X₃₇X₃₈X₃₉VI | 749 |
| EX₁₂X₁₃X₁₄X₁₅X₁₆X₁₇X₁₈X₁₉X₂₀AEDX₂₄X₂₅X₂₆X₂₇X₂₈X₂₉X₃₀X₃₁X₃₂X₃₃X₃₄X₃₅X₃₆X₃₇X₃₈X₃₉VI | 750 |
| X₁₂X₁₃X₁₄X₁₅X₁₆X₁₇X₁₈X₁₉X₂₀AEDX₂₄X₂₅X₂₆X₂₇X₂₈X₂₉X₃₀X₃₁X₃₂X₃₃X₃₄X₃₅X₃₆X₃₇X₃₈X₃₉VI | 751 |
| X₁₃X₁₄X₁₅X₁₆X₁₇X₁₈X₁₉X₂₀AEDX₂₄X₂₅X₂₆X₂₇X₂₈X₂₉X₃₀X₃₁X₃₂X₃₃X₃₄X₃₅X₃₆X₃₇X₃₈VVI | 752 |
| X₁₄X₁₅X₁₆X₁₇X₁₈X₁₉X₂₀AEDX₂₄X₂₅X₂₆X₂₇X₂₈X₂₉X₃₀X₃₁X₃₂X₃₃X₃₄X₃₅X₃₆X₃₇GVVI | 753 |
| X₁₅X₁₆X₁₇X₁₈X₁₉X₂₀AEDX₂₄X₂₅X₂₆X₂₇X₂₈X₂₉X₃₀X₃₁X₃₂X₃₃X₃₄X₃₅X₃₆GGVVI | 754 |
| X₁₆X₁₇X₁₈X₁₉X₂₀AEDX₂₄X₂₅X₂₆X₂₇X₂₈X₂₉X₃₀X₃₁X₃₂X₃₃X₃₄X₃₅VGGVVI | 755 |
| X₁₇X₁₈X₁₉X₂₀AEDX₂₄X₂₅X₂₆X₂₇X₂₈X₂₉X₃₀X₃₁X₃₂X₃₃X₃₄MVGGVVI | 756 |
| X₁₈X₁₉X₂₀AEDX₂₄X₂₅X₂₆X₂₇X₂₈X₂₉X₃₀X₃₁X₃₂X₃₃LMVGGVVI | 757 |
| X₁₉X₂₀AEDX₂₄X₂₅X₂₆X₂₇X₂₈X₂₉X₃₀X₃₁X₃₂GLMVGGVVI | 758 |
| X₂₀AEDX₂₄X₂₅X₂₆X₂₇X₂₈X₂₉X₃₀X₃₁IGLMVGGVVI | 759 |
| DAEFRHDSGYEX₁₂X₁₃X₁₄X₁₅X₁₆X₁₇X₁₈X₁₉X₂₀AEDX₂₄X₂₅X₂₆X₂₇X₂₈X₂₉X₃₀X₃₁X₃₂X₃₃X₃₄X₃₅X₃₆X₃₇X₃₈X₃₉V | 760 |
| AEFRHDSGYEX₁₂X₁₃X₁₄X₁₅X₁₆X₁₇X₁₈X₁₉X₂₀AEDX₂₄X₂₅X₂₆X₂₇X₂₈X₂₉X₃₀X₃₁X₃₂X₃₃X₃₄X₃₅X₃₆X₃₇X₃₈X₃₉V | 761 |
| EFRHDSGYEX₁₂X₁₃X₁₄X₁₅X₁₆X₁₇X₁₈X₁₉X₂₀AEDX₂₄X₂₅X₂₆X₂₇X₂₈X₂₉X₃₀X₃₁X₃₂X₃₃X₃₄X₃₅X₃₆X₃₇X₃₈X₃₉V | 762 |
| FRHDSGYEX₁₂X₁₃X₁₄X₁₅X₁₆X₁₇X₁₈X₁₉X₂₀AEDX₂₄X₂₅X₂₆X₂₇X₂₈X₂₉X₃₀X₃₁X₃₂X₃₃X₃₄X₃₅X₃₆X₃₇X₃₈X₃₉V | 763 |
| RHDSGYEX₁₂X₁₃X₁₄X₁₅X₁₆X₁₇X₁₈X₁₉X₂₀AEDX₂₄X₂₅X₂₆X₂₇X₂₈X₂₉X₃₀X₃₁X₃₂X₃₃X₃₄X₃₅X₃₆X₃₇X₃₈X₃₉V | 764 |
| HDSGYEX₁₂X₁₃X₁₄X₁₅X₁₆X₁₇X₁₈X₁₉X₂₀AEDX₂₄X₂₅X₂₆X₂₇X₂₈X₂₉X₃₀X₃₁X₃₂X₃₃X₃₄X₃₅X₃₆X₃₇X₃₈X₃₉V | 765 |
| DSGYEX₁₂X₁₃X₁₄X₁₅X₁₆X₁₇X₁₈X₁₉X₂₀AEDX₂₄X₂₅X₂₆X₂₇X₂₈X₂₉X₃₀X₃₁X₃₂X₃₃X₃₄X₃₅X₃₆X₃₇X₃₈X₃₉V | 766 |
| SGYEX₁₂X₁₃X₁₄X₁₅X₁₆X₁₇X₁₈X₁₉X₂₀AEDX₂₄X₂₅X₂₆X₂₇X₂₈X₂₉X₃₀X₃₁X₃₂X₃₃X₃₄X₃₅X₃₆X₃₇X₃₈X₃₉V | 767 |
| GYEX₁₂X₁₃X₁₄X₁₅X₁₆X₁₇X₁₈X₁₉X₂₀AEDX₂₄X₂₅X₂₆X₂₇X₂₈X₂₉X₃₀X₃₁X₃₂X₃₃X₃₄X₃₅X₃₆X₃₇X₃₈X₃₉V | 768 |
| YEX₁₂X₁₃X₁₄X₁₅X₁₆X₁₇X₁₈X₁₉X₂₀AEDX₂₄X₂₅X₂₆X₂₇X₂₈X₂₉X₃₀X₃₁X₃₂X₃₃X₃₄X₃₅X₃₆X₃₇X₃₈X₃₉V | 769 |
| EX₁₂X₁₃X₁₄X₁₅X₁₆X₁₇X₁₈X₁₉X₂₀AEDX₂₄X₂₅X₂₆X₂₇X₂₈X₂₉X₃₀X₃₁X₃₂X₃₃X₃₄X₃₅X₃₆X₃₇X₃₈X₃₉V | 770 |
| X₁₂X₁₃X₁₄X₁₅X₁₆X₁₇X₁₈X₁₉X₂₀AEDX₂₄X₂₅X₂₆X₂₇X₂₈X₂₉X₃₀X₃₁X₃₂X₃₃X₃₄X₃₅X₃₆X₃₇X₃₈X₃₉V | 771 |
| X₁₃X₁₄X₁₅X₁₆X₁₇X₁₈X₁₉X₂₀AEDX₂₄X₂₅X₂₆X₂₇X₂₈X₂₉X₃₀X₃₁X₃₂X₃₃X₃₄X₃₅X₃₆X₃₇X₃₈VV | 772 |
| X₁₄X₁₅X₁₆X₁₇X₁₈X₁₉X₂₀AEDX₂₄X₂₅X₂₆X₂₇X₂₈X₂₉X₃₀X₃₁X₃₂X₃₃X₃₄X₃₅X₃₆X₃₇GVV | 773 |
| X₁₅X₁₆X₁₇X₁₈X₁₉X₂₀AEDX₂₄X₂₅X₂₆X₂₇X₂₈X₂₉X₃₀X₃₁X₃₂X₃₃X₃₄X₃₅X₃₆GGVV | 774 |
| X₁₆X₁₇X₁₈X₁₉X₂₀AEDX₂₄X₂₅X₂₆X₂₇X₂₈X₂₉X₃₀X₃₁X₃₂X₃₃X₃₄X₃₅VGGVV | 775 |
| X₁₇X₁₈X₁₉X₂₀AEDX₂₄X₂₅X₂₆X₂₇X₂₈X₂₉X₃₀X₃₁X₃₂X₃₃X₃₄MVGGVV | 776 |
| X₁₈X₁₉X₂₀AEDX₂₄X₂₅X₂₆X₂₇X₂₈X₂₉X₃₀X₃₁X₃₂X₃₃LMVGGVV | 777 |
| X₁₉X₂₀AEDX₂₄X₂₅X₂₆X₂₇X₂₈X₂₉X₃₀X₃₁X₃₂GLMVGGVV | 778 |
| X₂₀AEDX₂₄X₂₅X₂₆X₂₇X₂₈X₂₉X₃₀X₃₁IGLMVGGVV | 779 |
| DAEFRHDSGYEX₁₂X₁₃X₁₄X₁₅X₁₆X₁₇X₁₈X₁₉X₂₀AEDX₂₄X₂₅X₂₆X₂₇X₂₈X₂₉X₃₀X₃₁X₃₂X₃₃X₃₄X₃₅X₃₆X₃₇X₃₈X₃₉ | 780 |
| AEFRHDSGYEX₁₂X₁₃X₁₄X₁₅X₁₆X₁₇X₁₈X₁₉X₂₀AEDX₂₄X₂₅X₂₆X₂₇X₂₈X₂₉X₃₀X₃₁X₃₂X₃₃X₃₄X₃₅X₃₆X₃₇X₃₈X₃₉ | 781 |
| EFRHDSGYEX₁₂X₁₃X₁₄X₁₅X₁₆X₁₇X₁₈X₁₉X₂₀AEDX₂₄X₂₅X₂₆X₂₇X₂₈X₂₉X₃₀X₃₁X₃₂X₃₃X₃₄X₃₅X₃₆X₃₇X₃₈X₃₉ | 782 |
| FRHDSGYEX₁₂X₁₃X₁₄X₁₅X₁₆X₁₇X₁₈X₁₉X₂₀AEDX₂₄X₂₅X₂₆X₂₇X₂₈X₂₉X₃₀X₃₁X₃₂X₃₃X₃₄X₃₅X₃₆X₃₇X₃₈X₃₉ | 783 |
| RHDSGYEX₁₂X₁₃X₁₄X₁₅X₁₆X₁₇X₁₈X₁₉X₂₀AEDX₂₄X₂₅X₂₆X₂₇X₂₈X₂₉X₃₀X₃₁X₃₂X₃₃X₃₄X₃₅X₃₆X₃₇X₃₈X₃₉ | 784 |
| HDSGYEX₁₂X₁₃X₁₄X₁₅X₁₆X₁₇X₁₈X₁₉X₂₀AEDX₂₄X₂₅X₂₆X₂₇X₂₈X₂₉X₃₀X₃₁X₃₂X₃₃X₃₄X₃₅X₃₆X₃₇X₃₈X₃₉ | 785 |
| DSGYEX₁₂X₁₃X₁₄X₁₅X₁₆X₁₇X₁₈X₁₉X₂₀AEDX₂₄X₂₅X₂₆X₂₇X₂₈X₂₉X₃₀X₃₁X₃₂X₃₃X₃₄X₃₅X₃₆X₃₇X₃₈X₃₉ | 786 |
| SGYEX₁₂X₁₃X₁₄X₁₅X₁₆X₁₇X₁₈X₁₉X₂₀AEDX₂₄X₂₅X₂₆X₂₇X₂₈X₂₉X₃₀X₃₁X₃₂X₃₃X₃₄X₃₅X₃₆X₃₇X₃₈X₃₉ | 787 |
| GYEX₁₂X₁₃X₁₄X₁₅X₁₆X₁₇X₁₈X₁₉X₂₀AEDX₂₄X₂₅X₂₆X₂₇X₂₈X₂₉X₃₀X₃₁X₃₂X₃₃X₃₄X₃₅X₃₆X₃₇X₃₈X₃₉ | 788 |
| YEX₁₂X₁₃X₁₄X₁₅X₁₆X₁₇X₁₈X₁₉X₂₀AEDX₂₄X₂₅X₂₆X₂₇X₂₈X₂₉X₃₀X₃₁X₃₂X₃₃X₃₄X₃₅X₃₆X₃₇X₃₈X₃₉ | 789 |
| EX₁₂X₁₃X₁₄X₁₅X₁₆X₁₇X₁₈X₁₉X₂₀AEDX₂₄X₂₅X₂₆X₂₇X₂₈X₂₉X₃₀X₃₁X₃₂X₃₃X₃₄X₃₅X₃₆X₃₇X₃₈X₃₉ | 790 |
| X₁₂X₁₃X₁₄X₁₅X₁₆X₁₇X₁₈X₁₉X₂₀AEDX₂₄X₂₅X₂₆X₂₇X₂₈X₂₉X₃₀X₃₁X₃₂X₃₃X₃₄X₃₅X₃₆X₃₇X₃₈X₃₉ | 791 |
| X₁₃X₁₄X₁₅X₁₆X₁₇X₁₈X₁₉X₂₀AEDX₂₄X₂₅X₂₆X₂₇X₂₈X₂₉X₃₀X₃₁X₃₂X₃₃X₃₄X₃₅X₃₆X₃₇X₃₈V | 792 |
| X₁₄X₁₅X₁₆X₁₇X₁₈X₁₉X₂₀AEDX₂₄X₂₅X₂₆X₂₇X₂₈X₂₉X₃₀X₃₁X₃₂X₃₃X₃₄X₃₅X₃₆X₃₇GV | 793 |
| X₁₅X₁₆X₁₇X₁₈X₁₉X₂₀AEDX₂₄X₂₅X₂₆X₂₇X₂₈X₂₉X₃₀X₃₁X₃₂X₃₃X₃₄X₃₅X₃₆GGV | 794 |
| X₁₆X₁₇X₁₈X₁₉X₂₀AEDX₂₄X₂₅X₂₆X₂₇X₂₈X₂₉X₃₀X₃₁X₃₂X₃₃X₃₄X₃₅VGGV | 795 |
| X₁₇X₁₈X₁₉X₂₀AEDX₂₄X₂₅X₂₆X₂₇X₂₈X₂₉X₃₀X₃₁X₃₂X₃₃X₃₄MVGGV | 796 |
| X₁₈X₁₉X₂₀AEDX₂₄X₂₅X₂₆X₂₇X₂₈X₂₉X₃₀X₃₁X₃₂X₃₃LMVGGV | 797 |
| X₁₉X₂₀AEDX₂₄X₂₅X₂₆X₂₇X₂₈X₂₉X₃₀X₃₁X₃₂GLMVGGV | 798 |
| X₂₀AEDX₂₄X₂₅X₂₆X₂₇X₂₈X₂₉X₃₀X₃₁IGLMVGGV | 799 |
| DAEFRHDSGYEVX₁₃X₁₄X₁₅X₁₆X₁₇X₁₈X₁₉X₂₀AEDX₂₄X₂₅X₂₆X₂₇X₂₈X₂₉X₃₀X₃₁X₃₂X₃₃X₃₄X₃₅X₃₆X₃₇X₃₈ | 800 |
| AEFRHDSGYEVX₁₃X₁₄X₁₅X₁₆X₁₇X₁₈X₁₉X₂₀AEDX₂₄X₂₅X₂₆X₂₇X₂₈X₂₉X₃₀X₃₁X₃₂X₃₃X₃₄X₃₅X₃₆X₃₇X₃₈ | 801 |
| EFRHDSGYEVX₁₃X₁₄X₁₅X₁₆X₁₇X₁₈X₁₉X₂₀AEDX₂₄X₂₅X₂₆X₂₇X₂₈X₂₉X₃₀X₃₁X₃₂X₃₃X₃₄X₃₅X₃₆X₃₇X₃₈ | 802 |
| FRHDSGYEVX₁₃X₁₄X₁₅X₁₆X₁₇X₁₈X₁₉X₂₀AEDX₂₄X₂₅X₂₆X₂₇X₂₈X₂₉X₃₀X₃₁X₃₂X₃₃X₃₄X₃₅X₃₆X₃₇X₃₈ | 803 |
| RHDSGYEVX₁₃X₁₄X₁₅X₁₆X₁₇X₁₈X₁₉X₂₀AEDX₂₄X₂₅X₂₆X₂₇X₂₈X₂₉X₃₀X₃₁X₃₂X₃₃X₃₄X₃₅X₃₆X₃₇X₃₈ | 804 |
| HDSGYEVX₁₃X₁₄X₁₅X₁₆X₁₇X₁₈X₁₉X₂₀AEDX₂₄X₂₅X₂₆X₂₇X₂₈X₂₉X₃₀X₃₁X₃₂X₃₃X₃₄X₃₅X₃₆X₃₇X₃₈ | 805 |
| DSGYEVX₁₃X₁₄X₁₅X₁₆X₁₇X₁₈X₁₉X₂₀AEDX₂₄X₂₅X₂₆X₂₇X₂₈X₂₉X₃₀X₃₁X₃₂X₃₃X₃₄X₃₅X₃₆X₃₇X₃₈ | 806 |
| SGYEVX₁₃X₁₄X₁₅X₁₆X₁₇X₁₈X₁₉X₂₀AEDX₂₄X₂₅X₂₆X₂₇X₂₈X₂₉X₃₀X₃₁X₃₂X₃₃X₃₄X₃₅X₃₆X₃₇X₃₈ | 807 |
| GYEVX₁₃X₁₄X₁₅X₁₆X₁₇X₁₈X₁₉X₂₀AEDX₂₄X₂₅X₂₆X₂₇X₂₈X₂₉X₃₀X₃₁X₃₂X₃₃X₃₄X₃₅X₃₆X₃₇X₃₈ | 808 |
| YEVX₁₃X₁₄X₁₅X₁₆X₁₇X₁₈X₁₉X₂₀AEDX₂₄X₂₅X₂₆X₂₇X₂₈X₂₉X₃₀X₃₁X₃₂X₃₃X₃₄X₃₅X₃₆X₃₇X₃₈ | 809 |
| EVX₁₃X₁₄X₁₅X₁₆X₁₇X₁₈X₁₉X₂₀AEDX₂₄X₂₅X₂₆X₂₇X₂₈X₂₉X₃₀X₃₁X₃₂X₃₃X₃₄X₃₅X₃₆X₃₇X₃₈ | 810 |
| VX₁₃X₁₄X₁₅X₁₆X₁₇X₁₈X₁₉X₂₀AEDX₂₄X₂₅X₂₆X₂₇X₂₈X₂₉X₃₀X₃₁X₃₂X₃₃X₃₄X₃₅X₃₆X₃₇X₃₈ | 811 |
| X₁₃X₁₄X₁₅X₁₆X₁₇X₁₈X₁₉X₂₀AEDX₂₄X₂₅X₂₆X₂₇X₂₈X₂₉X₃₀X₃₁X₃₂X₃₃X₃₄X₃₅X₃₆X₃₇X₃₈ | 813 |
| X₁₄X₁₅X₁₆X₁₇X₁₈X₁₉X₂₀AEDX₂₄X₂₅X₂₆X₂₇X₂₈X₂₉X₃₀X₃₁X₃₂X₃₃X₃₄X₃₅X₃₆X₃₇G | 814 |
| X₁₅X₁₆X₁₇X₁₈X₁₉X₂₀AEDX₂₄X₂₅X₂₆X₂₇X₂₈X₂₉X₃₀X₃₁X₃₂X₃₃X₃₄X₃₅X₃₆₃₈GG | 815 |
| X₁₆X₁₇X₁₈X₁₉X₂₀AEDX₂₄X₂₅X₂₆X₂₇X₂₈X₂₉X₃₀X₃₁X₃₂X₃₃X₃₄X₃₅VGG | 816 |
| X₁₇X₁₈X₁₉X₂₀AEDX₂₄X₂₅X₂₆X₂₇X₂₈X₂₉X₃₀X₃₁X₃₂X₃₃X₃₄MVGG | 817 |
| X₁₈X₁₉X₂₀AEDX₂₄X₂₅X₂₆X₂₇X₂₈X₂₉X₃₀X₃₁X₃₂X₃₃LMVGG | 818 |
| X₁₉X₂₀AEDX₂₄X₂₅X₂₆X₂₇X₂₈X₂₉X₃₀X₃₁X₃₂GLMVGG | 819 |
| X₂₀AEDX₂₄X₂₅X₂₆X₂₇X₂₈X₂₉X₃₀X₃₁IGLMVGG | 820 |
| DAEFRHDSGYEVHX₁₄X₁₅X₁₆X₁₇X₁₈X₁₉X₂₀AEDX₂₄X₂₅X₂₆X₂₇X₂₈X₂₉X₃₀X₃₁X₃₂X₃₃X₃₄X₃₅X₃₆X₃₇ | 821 |
| AEFRHDSGYEVHX₁₄X₁₅X₁₆X₁₇X₁₈X₁₉X₂₀AEDX₂₄X₂₅X₂₆X₂₇X₂₈X₂₉X₃₀X₃₁X₃₂X₃₃X₃₄X₃₅X₃₆X₃₇ | 822 |
| EFRHDSGYEVHX₁₄X₁₅X₁₆X₁₇X₁₈X₁₉X₂₀AEDX₂₄X₂₅X₂₆X₂₇X₂₈X₂₉X₃₀X₃₁X₃₂X₃₃X₃₄X₃₅X₃₆X₃₇ | 823 |
| FRHDSGYEVHX₁₄X₁₅X₁₆X₁₇X₁₈X₁₉X₂₀AEDX₂₄X₂₅X₂₆X₂₇X₂₈X₂₉X₃₀X₃₁X₃₂X₃₃X₃₄X₃₅X₃₆X₃₇ | 824 |
| RHDSGYEVHX₁₄X₁₅X₁₆X₁₇X₁₈X₁₉X₂₀AEDX₂₄X₂₅X₂₆X₂₇X₂₈X₂₉X₃₀X₃₁X₃₂X₃₃X₃₄X₃₅X₃₆X₃₇ | 825 |
| HDSGYEVHX₁₄X₁₅X₁₆X₁₇X₁₈X₁₉X₂₀AEDX₂₄X₂₅X₂₆X₂₇X₂₈X₂₉X₃₀X₃₁X₃₂X₃₃X₃₄X₃₅X₃₆X₃₇ | 826 |
| DSGYEVHX₁₄X₁₅X₁₆X₁₇X₁₈X₁₉X₂₀AEDX₂₄X₂₅X₂₆X₂₇X₂₈X₂₉X₃₀X₃₁X₃₂X₃₃X₃₄X₃₅X₃₆X₃₇ | 827 |
| SGYEVHX₁₄X₁₅X₁₆X₁₇X₁₈X₁₉X₂₀AEDX₂₄X₂₅X₂₆X₂₇X₂₈X₂₉X₃₀X₃₁X₃₂X₃₃X₃₄X₃₅X₃₆X₃₇ | 828 |
| GYEVHX₁₄X₁₅X₁₆X₁₇X₁₈X₁₉X₂₀AEDX₂₄X₂₅X₂₆X₂₇X₂₈X₂₉X₃₀X₃₁X₃₂X₃₃X₃₄X₃₅X₃₆X₃₇ | 829 |
| YEVHX₁₄X₁₅X₁₆X₁₇X₁₈X₁₉X₂₀AEDX₂₄X₂₅X₂₆X₂₇X₂₈X₂₉X₃₀X₃₁X₃₂X₃₃X₃₄X₃₅X₃₆X₃₇ | 830 |
| EVHX₁₄X₁₅X₁₆X₁₇X₁₈X₁₉X₂₀AEDX₂₄X₂₅X₂₆X₂₇X₂₈X₂₉X₃₀X₃₁X₃₂X₃₃X₃₄X₃₅X₃₆X₃₇ | 831 |
| VHX₁₄X₁₅X₁₆X₁₇X₁₈X₁₉X₂₀AEDX₂₄X₂₅X₂₆X₂₇X₂₈X₂₉X₃₀X₃₁X₃₂X₃₃X₃₄X₃₅X₃₆X₃₇ | 832 |
| HX₁₄X₁₅X₁₆X₁₇X₁₈X₁₉X₂₀AEDX₂₄X₂₅X₂₆X₂₇X₂₈X₂₉X₃₀X₃₁X₃₂X₃₃X₃₄X₃₅X₃₆X₃₇ | 833 |
| X₁₄X₁₅X₁₆X₁₇X₁₈X₁₉X₂₀AEDX₂₄X₂₅X₂₆X₂₇X₂₈X₂₉X₃₀X₃₁X₃₂X₃₃X₃₄X₃₅X₃₆X₃₇ | 834 |
| X₁₅X₁₆X₁₇X₁₈X₁₉X₂₀AEDX₂₄X₂₅X₂₆X₂₇X₂₈X₂₉X₃₀X₃₁X₃₂X₃₃X₃₄X₃₅X₃₆G | 835 |
| X₁₆X₁₇X₁₈X₁₉X₂₀AEDX₂₄X₂₅X₂₆X₂₇X₂₈X₂₉X₃₀X₃₁X₃₂X₃₃X₃₄X₃₅VG | 836 |
| X₁₇X₁₈X₁₉X₂₀AEDX₂₄X₂₅X₂₆X₂₇X₂₈X₂₉X₃₀X₃₁X₃₂X₃₃X₃₄MVG | 837 |
| X₁₈X₁₉X₂₀AEDX₂₄X₂₅X₂₆X₂₇X₂₈X₂₉X₃₀X₃₁X₃₂X₃₃LMVG | 838 |
| X₁₉X₂₀AEDX₂₄X₂₅X₂₆X₂₇X₂₈X₂₉X₃₀X₃₁X₃₂GLMVG | 839 |
| X₂₀AEDX₂₄X₂₅X₂₆X₂₇X₂₈X₂₉X₃₀X₃₁IGLMVG | 840 |
| DAEFRHDSGYEVHHX₁₅X₁₆X₁₇X₁₈X₁₉X₂₀AEDX₂₄X₂₅X₂₆X₂₇X₂₈X₂₉X₃₀X₃₁X₃₂X₃₃X₃₄X₃₅X₃₆ | 841 |
| AEFRHDSGYEVHHX₁₅X₁₆X₁₇X₁₈X₁₉X₂₀AEDX₂₄X₂₅X₂₆X₂₇X₂₈X₂₉X₃₀X₃₁X₃₂X₃₃X₃₄X₃₅X₃₆ | 842 |
| EFRHDSGYEVHHX₁₅X₁₆X₁₇X₁₈X₁₉X₂₀AEDX₂₄X₂₅X₂₆X₂₇X₂₈X₂₉X₃₀X₃₁X₃₂X₃₃X₃₄X₃₅X₃₆ | 843 |
| FRHDSGYEVHHX₁₅X₁₆X₁₇X₁₈X₁₉X₂₀AEDX₂₄X₂₅X₂₆X₂₇X₂₈X₂₉X₃₀X₃₁X₃₂X₃₃X₃₄X₃₅X₃₆ | 844 |
| RHDSGYEVHHX₁₅X₁₆X₁₇X₁₈X₁₉X₂₀AEDX₂₄X₂₅X₂₆X₂₇X₂₈X₂₉X₃₀X₃₁X₃₂X₃₃X₃₄X₃₅X₃₆ | 845 |
| HDSGYEVHHX₁₅X₁₆X₁₇X₁₈X₁₉X₂₀AEDX₂₄X₂₅X₂₆X₂₇X₂₈X₂₉X₃₀X₃₁X₃₂X₃₃X₃₄X₃₅X₃₆ | 846 |
| DSGYEVHHX₁₅X₁₆X₁₇X₁₈X₁₉X₂₀AEDX₂₄X₂₅X₂₆X₂₇X₂₈X₂₉X₃₀X₃₁X₃₂X₃₃X₃₄X₃₅X₃₆ | 847 |
| SGYEVHHX₁₅X₁₆X₁₇X₁₈X₁₉X₂₀AEDX₂₄X₂₅X₂₆X₂₇X₂₈X₂₉X₃₀X₃₁X₃₂X₃₃X₃₄X₃₅X₃₆ | 848 |
| GYEVHHX₁₅X₁₆X₁₇X₁₈X₁₉X₂₀AEDX₂₄X₂₅X₂₆X₂₇X₂₈X₂₉X₃₀X₃₁X₃₂X₃₃X₃₄X₃₅X₃₆ | 849 |
| YEVHHX₁₅X₁₆X₁₇X₁₈X₁₉X₂₀AEDX₂₄X₂₅X₂₆X₂₇X₂₈X₂₉X₃₀X₃₁X₃₂X₃₃X₃₄X₃₅X₃₆ | 850 |
| EVHHX₁₅X₁₆X₁₇X₁₈X₁₉X₂₀AEDX₂₄X₂₅X₂₆X₂₇X₂₈X₂₉X₃₀X₃₁X₃₂X₃₃X₃₄X₃₅X₃₆ | 851 |
| VHHX₁₅X₁₆X₁₇X₁₈X₁₉X₂₀AEDX₂₄X₂₅X₂₆X₂₇X₂₈X₂₉X₃₀X₃₁X₃₂X₃₃X₃₄X₃₅X₃₆ | 852 |
| VHX₁₅X₁₆X₁₇X₁₈X₁₉X₂₀AEDX₂₄X₂₅X₂₆X₂₇X₂₈X₂₉X₃₀X₃₁X₃₂X₃₃X₃₄X₃₅X₃₆ | 853 |
| HX₁₅X₁₆X₁₇X₁₈X₁₉X₂₀AEDX₂₄X₂₅X₂₆X₂₇X₂₈X₂₉X₃₀X₃₁X₃₂X₃₃X₃₄X₃₅X₃₆ | 854 |
| X₁₅X₁₆X₁₇X₁₈X₁₉X₂₀AEDX₂₄X₂₅X₂₆X₂₇X₂₈X₂₉X₃₀X₃₁X₃₂X₃₃X₃₄X₃₅X₃₆ | 855 |
| X₁₆X₁₇X₁₈X₁₉X₂₀AEDX₂₄X₂₅X₂₆X₂₇X₂₈X₂₉X₃₀X₃₁X₃₂X₃₃X₃₄X₃₅V | 856 |
| X₁₇X₁₈X₁₉X₂₀AEDX₂₄X₂₅X₂₆X₂₇X₂₈X₂₉X₃₀X₃₁X₃₂X₃₃X₃₄MV | 857 |
| X₁₈X₁₉X₂₀AEDX₂₄X₂₅X₂₆X₂₇X₂₈X₂₉X₃₀X₃₁X₃₂X₃₃LMV | 858 |
| X₁₉X₂₀AEDX₂₄X₂₅X₂₆X₂₇X₂₈X₂₉X₃₀X₃₁X₃₂GLMV | 859 |
| X₂₀AEDX₂₄X₂₅X₂₆X₂₇X₂₈X₂₉X₃₀X₃₁IGLMV | 860 |
| DAEFRHDSGYEVHHQX₁₆X₁₇X₁₈X₁₉X₂₀AEDX₂₄X₂₅X₂₆X₂₇X₂₈X₂₉X₃₀X₃₁X₃₂X₃₃X₃₄X₃₅ | 861 |
| AEFRHDSGYEVHHQX₁₆X₁₇X₁₈X₁₉X₂₀AEDX₂₄X₂₅X₂₆X₂₇X₂₈X₂₉X₃₀X₃₁X₃₂X₃₃X₃₄X₃₅ | 862 |
| EFRHDSGYEVHHQX₁₆X₁₇X₁₈X₁₉X₂₀AEDX₂₄X₂₅X₂₆X₂₇X₂₈X₂₉X₃₀X₃₁X₃₂X₃₃X₃₄X₃₅ | 863 |
| FRHDSGYEVHHQX₁₆X₁₇X₁₈X₁₉X₂₀AEDX₂₄X₂₅X₂₆X₂₇X₂₈X₂₉X₃₀X₃₁X₃₂X₃₃X₃₄X₃₅ | 864 |
| RHDSGYEVHHQX₁₆X₁₇X₁₈X₁₉X₂₀AEDX₂₄X₂₅X₂₆X₂₇X₂₈X₂₉X₃₀X₃₁X₃₂X₃₃X₃₄X₃₅ | 865 |
| HDSGYEVHHQX₁₆X₁₇X₁₈X₁₉X₂₀AEDX₂₄X₂₅X₂₆X₂₇X₂₈X₂₉X₃₀X₃₁X₃₂X₃₃X₃₄X₃₅ | 866 |
| DSGYEVHHQX₁₆X₁₇X₁₈X₁₉X₂₀AEDX₂₄X₂₅X₂₆X₂₇X₂₈X₂₉X₃₀X₃₁X₃₂X₃₃X₃₄X₃₅ | 867 |
| SGYEVHHQX₁₆X₁₇X₁₈X₁₉X₂₀AEDX₂₄X₂₅X₂₆X₂₇X₂₈X₂₉X₃₀X₃₁X₃₂X₃₃X₃₄X₃₅ | 868 |
| GYEVHHQX₁₆X₁₇X₁₈X₁₉X₂₀AEDX₂₄X₂₅X₂₆X₂₇X₂₈X₂₉X₃₀X₃₁X₃₂X₃₃X₃₄X₃₅ | 869 |
| YEVHHQX₁₆X₁₇X₁₈X₁₉X₂₀AEDX₂₄X₂₅X₂₆X₂₇X₂₈X₂₉X₃₀X₃₁X₃₂X₃₃X₃₄X₃₅ | 870 |
| EVHHQX₁₆X₁₇X₁₈X₁₉X₂₀AEDX₂₄X₂₅X₂₆X₂₇X₂₈X₂₉X₃₀X₃₁X₃₂X₃₃X₃₄X₃₅ | 871 |
| VHHQX₁₆X₁₇X₁₈X₁₉X₂₀AEDX₂₄X₂₅X₂₆X₂₇X₂₈X₂₉X₃₀X₃₁X₃₂X₃₃X₃₄X₃₅ | 872 |
| HHQX₁₆X₁₇X₁₈X₁₉X₂₀AEDX₂₄X₂₅X₂₆X₂₇X₂₈X₂₉X₃₀X₃₁X₃₂X₃₃X₃₄X₃₅ | 873 |
| HQX₁₆X₁₇X₁₈X₁₉X₂₀AEDX₂₄X₂₅X₂₆X₂₇X₂₈X₂₉X₃₀X₃₁X₃₂X₃₃X₃₄X₃₅ | 874 |
| QX₁₆X₁₇X₁₈X₁₉X₂₀AEDX₂₄X₂₅X₂₆X₂₇X₂₈X₂₉X₃₀X₃₁X₃₂X₃₃X₃₄X₃₅ | 875 |
| X₁₆X₁₇X₁₈X₁₉X₂₀AEDX₂₄X₂₅X₂₆X₂₇X₂₈X₂₉X₃₀X₃₁X₃₂X₃₃X₃₄X₃₅ | 876 |
| X₁₇X₁₈X₁₉X₂₀AEDX₂₄X₂₅X₂₆X₂₇X₂₈X₂₉X₃₀X₃₁X₃₂X₃₃X₃₄M | 877 |
| X₁₈X₁₉X₂₀AEDX₂₄X₂₅X₂₆X₂₇X₂₈X₂₉X₃₀X₃₁X₃₂X₃₃LM | 878 |
| X₁₉X₂₀AEDX₂₄X₂₅X₂₆X₂₇X₂₈X₂₉X₃₀X₃₁X₃₂GLM | 879 |
| X₂₀AEDX₂₄X₂₅X₂₆X₂₇X₂₈X₂₉X₃₀X₃₁IGLM | 880 |
| DAEFRHDSGYEVHHQKX₁₇X₁₈X₁₉X₂₀AEDX₂₄X₂₅X₂₆X₂₇X₂₈X₂₉X₃₀X₃₁X₃₂X₃₃X₃₄ | 881 |
| AEFRHDSGYEVHHQKX₁₇X₁₈X₁₉X₂₀AEDX₂₄X₂₅X₂₆X₂₇X₂₈X₂₉X₃₀X₃₁X₃₂X₃₃X₃₄ | 882 |
| EFRHDSGYEVHHQKX₁₇X₁₈X₁₉X₂₀AEDX₂₄X₂₅X₂₆X₂₇X₂₈X₂₉X₃₀X₃₁X₃₂X₃₃X₃₄ | 883 |
| FRHDSGYEVHHQKX₁₇X₁₈X₁₉X₂₀AEDX₂₄X₂₅X₂₆X₂₇X₂₈X₂₉X₃₀X₃₁X₃₂X₃₃X₃₄ | 884 |
| RHDSGYEVHHQKX₁₇X₁₈X₁₉X₂₀AEDX₂₄X₂₅X₂₆X₂₇X₂₈X₂₉X₃₀X₃₁X₃₂X₃₃X₃₄ | 885 |
| HDSGYEVHHQKX₁₇X₁₈X₁₉X₂₀AEDX₂₄X₂₅X₂₆X₂₇X₂₈X₂₉X₃₀X₃₁X₃₂X₃₃X₃₄ | 886 |
| DSGYEVHHQKX₁₇X₁₈X₁₉X₂₀AEDX₂₄X₂₅X₂₆X₂₇X₂₈X₂₉X₃₀X₃₁X₃₂X₃₃X₃₄ | 887 |
| SGYEVHHQKX₁₇X₁₈X₁₉X₂₀AEDX₂₄X₂₅X₂₆X₂₇X₂₈X₂₉X₃₀X₃₁X₃₂X₃₃X₃₄ | 888 |
| GYEVHHQKX₁₇X₁₈X₁₉X₂₀AEDX₂₄X₂₅X₂₆X₂₇X₂₈X₂₉X₃₀X₃₁X₃₂X₃₃X₃₄ | 889 |
| YEVHHQKX₁₇X₁₈X₁₉X₂₀AEDX₂₄X₂₅X₂₆X₂₇X₂₈X₂₉X₃₀X₃₁X₃₂X₃₃X₃₄ | 890 |
| EVHHQKX₁₇X₁₈X₁₉X₂₀AEDX₂₄X₂₅X₂₆X₂₇X₂₈X₂₉X₃₀X₃₁X₃₂X₃₃X₃₄ | 891 |
| VHHQKX₁₇X₁₈X₁₉X₂₀AEDX₂₄X₂₅X₂₆X₂₇X₂₈X₂₉X₃₀X₃₁X₃₂X₃₃X₃₄ | 892 |
| HHQKX₁₇X₁₈X₁₉X₂₀AEDX₂₄X₂₅X₂₆X₂₇X₂₈X₂₉X₃₀X₃₁X₃₂X₃₃X₃₄ | 893 |
| HQKX₁₇X₁₈X₁₉X₂₀AEDX₂₄X₂₅X₂₆X₂₇X₂₈X₂₉X₃₀X₃₁X₃₂X₃₃X₃₄ | 894 |
| QKX₁₇X₁₈X₁₉X₂₀AEDX₂₄X₂₅X₂₆X₂₇X₂₈X₂₉X₃₀X₃₁X₃₂X₃₃X₃₄ | 895 |
| KX₁₇X₁₈X₁₉X₂₀AEDX₂₄X₂₅X₂₆X₂₇X₂₈X₂₉X₃₀X₃₁X₃₂X₃₃X₃₄ | 896 |
| X₁₇X₁₈X₁₉X₂₀AEDX₂₄X₂₅X₂₆X₂₇X₂₈X₂₉X₃₀X₃₁X₃₂X₃₃X₃₄ | 897 |
| X₁₈X₁₉X₂₀AEDX₂₄X₂₅X₂₆X₂₇X₂₈X₂₉X₃₀X₃₁X₃₂X₃₃L | 898 |
| X₁₉X₂₀AEDX₂₄X₂₅X₂₆X₂₇X₂₈X₂₉X₃₀X₃₁X₃₂GL | 899 |
| X₂₀AEDX₂₄X₂₅X₂₆X₂₇X₂₈X₂₉X₃₀X₃₁IGL | 900 |
| DAEFRHDSGYEVHHQKLX₁₈X₁₉X₂₀AEDX₂₄X₂₅X₂₆X₂₇X₂₈X₂₉X₃₀X₃₁X₃₂X₃₃ | 901 |
| AEFRHDSGYEVHHQKLX₁₈X₁₉X₂₀AEDX₂₄X₂₅X₂₆X₂₇X₂₈X₂₉X₃₀X₃₁X₃₂X₃₃ | 902 |
| EFRHDSGYEVHHQKLX₁₈X₁₉X₂₀AEDX₂₄X₂₅X₂₆X₂₇X₂₈X₂₉X₃₀X₃₁X₃₂X₃₃ | 903 |
| FRHDSGYEVHHQKLX₁₈X₁₉X₂₀AEDX₂₄X₂₅X₂₆X₂₇X₂₈X₂₉X₃₀X₃₁X₃₂X₃₃ | 904 |
| RHDSGYEVHHQKLX₁₈X₁₉X₂₀AEDX₂₄X₂₅X₂₆X₂₇X₂₈X₂₉X₃₀X₃₁X₃₂X₃₃ | 905 |
| HDSGYEVHHQKLX₁₈X₁₉X₂₀AEDX₂₄X₂₅X₂₆X₂₇X₂₈X₂₉X₃₀X₃₁X₃₂X₃₃ | 906 |
| DSGYEVHHQKLX₁₈X₁₉X₂₀AEDX₂₄X₂₅X₂₆X₂₇X₂₈X₂₉X₃₀X₃₁X₃₂X₃₃ | 907 |
| SGYEVHHQKLX₁₈X₁₉X₂₀AEDX₂₄X₂₅X₂₆X₂₇X₂₈X₂₉X₃₀X₃₁X₃₂X₃₃ | 908 |
| GYEVHHQKLX₁₈X₁₉X₂₀AEDX₂₄X₂₅X₂₆X₂₇X₂₈X₂₉X₃₀X₃₁X₃₂X₃₃ | 909 |
| YEVHHQKLX₁₈X₁₉X₂₀AEDX₂₄X₂₅X₂₆X₂₇X₂₈X₂₉X₃₀X₃₁X₃₂X₃₃ | 910 |
| EVHHQKLX₁₈X₁₉X₂₀AEDX₂₄X₂₅X₂₆X₂₇X₂₈X₂₉X₃₀X₃₁X₃₂X₃₃ | 911 |
| VHHQKLX₁₈X₁₉X₂₀AEDX₂₄X₂₅X₂₆X₂₇X₂₈X₂₉X₃₀X₃₁X₃₂X₃₃ | 912 |
| HHQKLX₁₈X₁₉X₂₀AEDX₂₄X₂₅X₂₆X₂₇X₂₈X₂₉X₃₀X₃₁X₃₂X₃₃ | 913 |
| HQKLX₁₈X₁₉X₂₀AEDX₂₄X₂₅X₂₆X₂₇X₂₈X₂₉X₃₀X₃₁X₃₂X₃₃ | 914 |
| QKLX₁₈X₁₉X₂₀AEDX₂₄X₂₅X₂₆X₂₇X₂₈X₂₉X₃₀X₃₁X₃₂X₃₃ | 915 |
| KLX₁₈X₁₉X₂₀AEDX₂₄X₂₅X₂₆X₂₇X₂₈X₂₉X₃₀X₃₁X₃₂X₃₃ | 916 |
| LX₁₈X₁₉X₂₀AEDX₂₄X₂₅X₂₆X₂₇X₂₈X₂₉X₃₀X₃₁X₃₂X₃₃ | 917 |
| X₁₈X₁₉X₂₀AEDX₂₄X₂₅X₂₆X₂₇X₂₈X₂₉X₃₀X₃₁X₃₂X₃₃ | 918 |
| X₁₉X₂₀AEDX₂₄X₂₅X₂₆X₂₇X₂₈X₂₉X₃₀X₃₁X₃₂G | 919 |
| X₂₀AEDX₂₄X₂₅X₂₆X₂₇X₂₈X₂₉X₃₀X₃₁IG | 920 |
| DAEFRHDSGYEVHHQKLVX₁₉X₂₀AEDX₂₄X₂₅X₂₆X₂₇X₂₈X₂₉X₃₀X₃₁X₃₂ | 921 |
| AEFRHDSGYEVHHQKLVX₁₉X₂₀AEDX₂₄X₂₅X₂₆X₂₇X₂₈X₂₉X₃₀X₃₁X₃₂ | 922 |
| EFRHDSGYEVHHQKLVX₁₉X₂₀AEDX₂₄X₂₅X₂₆X₂₇X₂₈X₂₉X₃₀X₃₁X₃₂ | 923 |
| FRHDSGYEVHHQKLVX₁₉X₂₀AEDX₂₄X₂₅X₂₆X₂₇X₂₈X₂₉X₃₀X₃₁X₃₂ | 924 |
| RHDSGYEVHHQKLVX₁₉X₂₀AEDX₂₄X₂₅X₂₆X₂₇X₂₈X₂₉X₃₀X₃₁X₃₂ | 925 |
| HDSGYEVHHQKLVX₁₉X₂₀AEDX₂₄X₂₅X₂₆X₂₇X₂₈X₂₉X₃₀X₃₁X₃₂ | 926 |
| DSGYEVHHQKLVX₁₉X₂₀AEDX₂₄X₂₅X₂₆X₂₇X₂₈X₂₉X₃₀X₃₁X₃₂ | 927 |
| SGYEVHHQKLVX₁₉X₂₀AEDX₂₄X₂₅X₂₆X₂₇X₂₈X₂₉X₃₀X₃₁X₃₂ | 928 |
| GYEVHHQKLVX₁₉X₂₀AEDX₂₄X₂₅X₂₆X₂₇X₂₈X₂₉X₃₀X₃₁X₃₂ | 929 |
| YEVHHQKLVX₁₉X₂₀AEDX₂₄X₂₅X₂₆X₂₇X₂₈X₂₉X₃₀X₃₁X₃₂ | 930 |
| EVHHQKLVX₁₉X₂₀AEDX₂₄X₂₅X₂₆X₂₇X₂₈X₂₉X₃₀X₃₁X₃₂ | 931 |
| VHHQKLVX₁₉X₂₀AEDX₂₄X₂₅X₂₆X₂₇X₂₈X₂₉X₃₀X₃₁X₃₂ | 932 |
| HHQKLVX₁₉X₂₀AEDX₂₄X₂₅X₂₆X₂₇X₂₈X₂₉X₃₀X₃₁X₃₂ | 933 |
| HQKLVX₁₉X₂₀AEDX₂₄X₂₅X₂₆X₂₇X₂₈X₂₉X₃₀X₃₁X₃₂ | 934 |
| QKLVX₁₉X₂₀AEDX₂₄X₂₅X₂₆X₂₇X₂₈X₂₉X₃₀X₃₁X₃₂ | 935 |
| KLVX₁₉X₂₀AEDX₂₄X₂₅X₂₆X₂₇X₂₈X₂₉X₃₀X₃₁X₃₂ | 936 |
| LVX₁₉X₂₀AEDX₂₄X₂₅X₂₆X₂₇X₂₈X₂₉X₃₀X₃₁X₃₂ | 937 |
| VX₁₉X₂₀AEDX₂₄X₂₅X₂₆X₂₇X₂₈X₂₉X₃₀X₃₁X₃₂ | 938 |
| X₁₉X₂₀AEDX₂₄X₂₅X₂₆X₂₇X₂₈X₂₉X₃₀X₃₁X₃₂ | 939 |
| X₂₀AEDX₂₄X₂₅X₂₆X₂₇X₂₈X₂₉X₃₀X₃₁I | 940 |
| DAEFRHDSGYEVHHQKLVFX₂₀AEDX₂₄X₂₅X₂₆X₂₇X₂₈X₂₉X₃₀X₃₁ | 941 |
| AEFRHDSGYEVHHQKLVFX₂₀AEDX₂₄X₂₅X₂₆X₂₇X₂₈X₂₉X₃₀X₃₁ | 942 |
| EFRHDSGYEVHHQKLVFX₂₀AEDX₂₄X₂₅X₂₆X₂₇X₂₈X₂₉X₃₀X₃₁ | 943 |
| FRHDSGYEVHHQKLVFX₂₀AEDX₂₄X₂₅X₂₆X₂₇X₂₈X₂₉X₃₀X₃₁ | 944 |
| RHDSGYEVHHQKLVFX₂₀AEDX₂₄X₂₅X₂₆X₂₇X₂₈X₂₉X₃₀X₃₁ | 945 |
| HDSGYEVHHQKLVFX₂₀AEDX₂₄X₂₅X₂₆X₂₇X₂₈X₂₉X₃₀X₃₁ | 946 |
| DSGYEVHHQKLVFX₂₀AEDX₂₄X₂₅X₂₆X₂₇X₂₈X₂₉X₃₀X₃₁ | 947 |
| SGYEVHHQKLVFX₂₀AEDX₂₄X₂₅X₂₆X₂₇X₂₈X₂₉X₃₀X₃₁ | 948 |
| GYEVHHQKLVFX₂₀AEDX₂₄X₂₅X₂₆X₂₇X₂₈X₂₉X₃₀X₃₁ | 949 |
| YEVHHQKLVFX₂₀AEDX₂₄X₂₅X₂₆X₂₇X₂₈X₂₉X₃₀X₃₁ | 950 |
| EVHHQKLVFX₂₀AEDX₂₄X₂₅X₂₆X₂₇X₂₈X₂₉X₃₀X₃₁ | 951 |
| VHHQKLVFX₂₀AEDX₂₄X₂₅X₂₆X₂₇X₂₈X₂₉X₃₀X₃₁ | 952 |
| HHQKLVFX₂₀AEDX₂₄X₂₅X₂₆X₂₇X₂₈X₂₉X₃₀X₃₁ | 953 |
| HQKLVFX₂₀AEDX₂₄X₂₅X₂₆X₂₇X₂₈X₂₉X₃₀X₃₁ | 954 |
| QKLVFX₂₀AEDX₂₄X₂₅X₂₆X₂₇X₂₈X₂₉X₃₀X₃₁ | 955 |
| KLVFX₂₀AEDX₂₄X₂₅X₂₆X₂₇X₂₈X₂₉X₃₀X₃₁ | 956 |
| LVFX₂₀AEDX₂₄X₂₅X₂₆X₂₇X₂₈X₂₉X₃₀X₃₁ | 957 |
| VFX₂₀AEDX₂₄X₂₅X₂₆X₂₇X₂₈X₂₉X₃₀X₃₁ | 958 |
| FX₂₀AEDX₂₄X₂₅X₂₆X₂₇X₂₈X₂₉X₃₀X₃₁ | 959 |
| X₂₀AEDX₂₄X₂₅X₂₆X₂₇X₂₈X₂₉X₃₀X₃₁ | 960 |

[0178] Said intra-sequence covalent linkage(s) is (are) intended to stabilize the loop and optionally further secondary structure elements of the amyloid β peptide analogues of the invention, as described. Accordingly, the covalenty linked amino acid residues are expediently separated by at least the loop-forming amino acids, for instance the sequence X₂₄X₂₅X₂₆X₂₇, as described herein. Particularly preferred positions of the intra-sequence covalent linkages in SEQ ID NO: 699-960 may be described in the form of the following embodiments:

[0179] At least one amino acid residue selected from the group consisting of X₁₂, X₁₃, X₁₄, and at least one amino acid residue selected from the group consisting of X₃₇, X₃₈, X₃₉ are covalently linked with each other.

[0180] At least one amino acid residue selected from the group consisting of X₁₃, X₁₄, X₁₅, and at least one amino acid residue selected from the group consisting of X₃₆, X₃₇, X₃₈ are covalently linked with each other.

[0181] At least one amino acid residue selected from the group consisting of X₁₄, X₁₅, X₁₆, and at least one amino acid residue selected from the group consisting of X₃₅, X₃₆, X₃₇ are covalently linked with each other.

[0182] At least one amino acid residue selected from the group consisting of X₁₅, X₁₆, X₁₇, and at least one amino acid residue selected from the group consisting of X₃₄, X₃₅, X₃₆ are covalently linked with each other.

[0183] At least one amino acid residue selected from the group consisting of X₁₆, X₁₇, X₁₈, and at least one amino acid residue selected from the group consisting of X₃₃, X₃₄, X₃₅ are covalently linked with each other.

[0184] At least one amino acid residue selected from the group consisting of X₁₇, X₁₈, X₁₉, and at least one amino acid residue selected from the group consisting of X₃₂, X₃₃, X₃₄ are covalently linked with each other.

[0185] At least one amino acid residue selected from the group consisting of X₁₈, X₁₉, X₂₀, and at least one amino acid residue selected from the group consisting of X₃₁, X₃₂, X₃₃ are covalently linked with each other.

[0186] At least one amino acid residue selected from the group consisting of X₁₉, X₂₀, and at least one amino acid residue selected from the group consisting of X₃₀, X₃₁, X₃₂ are covalently linked with each other.

[0187] Amino acid residue X₂₀ and at least one amino acid residue selected from the group consisting of X₂₉, X₃₀, X₃₁ are covalently linked with each other.

[0188] More particularly, the amino acid residues X₁₂ and X₃₉, X₁₃ and X₃₈, X₁₄ and X₃₇, X₁₅ and X₃₆, X₁₆ and X₃₅, X₁₇ and X₃₄, X₁₈ and X₃₃, X₁₉ and X₃₂, or X₂₀ and X₃₁ may expediently covalently linked with each other.

[0189] It is noted that the amino acid sequence of the amyloid β peptide analogues of the invention may comprise further amino acid residues than those specifically described herein. In particular, there may be one or more than one additional amino acid residue at the N-terminal and/or C-terminal position of the sequences selected from the group consisting of SEQ ID NO:1-960. For instance, the amino acid sequence of the amyloid β peptide analogues of the invention may comprise a methionine at the N-terminal position of one of the sequences set forth in SEQ ID NO:1-960, especially if the peptide corresponding to the amino acid sequence is produced recombinantly in a prokaryotic host. Further, one or more than one amino acids may be inserted into the amino acid sequences described herein.

[0190] It is further noted that those sequences among SEQ ID NO:1-960 which lack 3, 11, 15 or 19 N-terminal amino acids from either SEQ ID NO:1, SEQ ID NO:369 or SEQ ID NO:699 represent particular embodiments of the present invention.

[0191] Likewise, it is noted that those sequences among SEQ ID NO:1-960 which lack 1, 2, 3, 4, 5, 6, 7 or 8 C-terminal amino acids from either SEQ ID NO:1, SEQ ID NO:369 or SEQ ID NO:699 represent particular embodiments of the present invention.

[0192] Particular embodiments of the present invention include amyloid β peptide analogues as defined herein, wherein the amino acid sequence is Aβ(1-42), Aβ(12-42), Aβ(16-42), Aβ(20-42), or Aβ(16-35), with the amino acid at position 14, 15, 16, 17, 18, 19, 20, 21, or 22 being selected from the group consisting cysteine, lysine, glutamic acid or aspartic acid, in particular cysteine or lysine, and the amino acid at position 37, 36, 35, 34, 33, 32, 31, 30, or 29 being selected from the group consisting cysteine, lysine, glutamic acid or aspartic acid, in particular cysteine, lysine, or glutamic acid, and the amino acid at position 14 is covalently linked with the amino acid at position 37, the amino acid at position 15 is covalently linked with the amino acid at position 36, the amino acid at position 16 is covalently linked with the amino acid at position 35, the amino acid at position 17 is covalently linked with the amino acid at position 34, the amino acid at position 18 is covalently linked with the amino acid at position 33, the amino acid at position 19 is covalently linked with the amino acid at position 32, the amino acid at position 120 is covalently linked with the amino acid at position 31, the amino acid at position 21 is covalently linked with the amino acid at position 30, or the amino acid at position 22 is covalently linked with the amino acid at position 29.

[0193] A covalent linkage between two amino acid residues may be established by a variety of means well known in the art, for instance by disulfide bridge formation or cross-linking techniques. In particular, the side chains of amino acid residues may be linked with each other. Especially side chains with a functional group, e.g., a thiol, amino, carboxyl or hydroxyl group, may linked with each other directly, such as two cysteine residues which form a disulfide bridge, or indirectly via a linker. Accordingly, the amino acid residue that is covalently linked to the other amino acid residues may in particular be that of an amino acid residue selected from the group consisting of cysteine, lysine, aspartic acid and glutamic acid.

[0194] The crosslinking of proteins has a long and exhaustive history, with large amounts of literature precedent. Any methodology known to those familiar with the art that allows for specific covalent cross-links to be made between natural or non-natural amino acid side chains can be used to form the position specific cross-links envisioned in this invention. Some examples of this methodology are listed below.

[0195] There are a large number of chemical cross-linking agents that are known to those skilled in the art. For the present invention, the preferred cross-linking agents include homobifunctional and heterobifunctional cross-linkers, with heterobifunctional cross-linkers being preferred due to their suitability to link amino acids in a stepwise manner.

[0196] Also, heterobifunctional cross-linkers provide the ability to establish more specific linkages, thereby reducing the occurrences of unwanted side reactions.

[0197] A wide variety of heterobifunctional cross-linkers are known in the art.

[0198] These include heterobifunctional cross-linkers for forming linkages between two amino (—NH₂) groups, one amino and one thiol (or sufhydryl, i.e., —SH) group, or two thiol groups.

[0199] One reactive group useful as part of a heterobifunctional cross-linker is an amine-reactive group. Common amine-reactive groups include N-hydroxysuccinimide (NHS) esters. NHS esters react specifically with free amines (e.g., lysine residues) in minutes, under slightly acidic to neutral (pH 6.5-7.5) conditions.

[0200] It is noted that the cross-linking agents having N-hydroxysuccinimide moieties can also be used in the form of their N-hydroxysulfosuccinimide analogs, which generally have greater water solubility.

[0201] Another reactive group useful as part of a heterobifunctional cross-linker is a thiol reactive group. Common thiol reactive groups include maleimides, halogens, and pyridyl disulfides. Maleimides react specifically with free thiol groups (e.g., in cysteine residues) in minutes, preferably under slightly acidic to neutral (pH 6.5-7.5) conditions. Halogens (iodoacetyl functions) react with —SH groups at physiological pH's. Both of these reactive groups result in the formation of stable thioether bonds.

[0202] For instance, succinimidyl-4-(N-maleimidomethyl)-cyclohexane-1-carboxylate (SMCC) or sulfo-SMCC can be used to form a cross-link between the amine of, e.g., a Lys side chain and the free —SH of, e.g., a Cys side chain. The amine-reactive N-hydroxysuccinimide (NHS) ester will react with an amino group (e.g., that of a Lys residue) to form a stable amide bond. The resulting maleimide-activated peptide will then react with a sulfhydryl group of the same peptide (e.g., that of a Cys residue) to form a disulfide bond, thereby establishing the covalent linkage. This chemistry is well described in the literature; see for instance: Uto, I., et al. (1991). J. Immunol. Methods 138, 87-94; Bieniarz, C., et al. (1996). Extended Length Heterobifunctional Coupling Agents for Protein Conjugations. Bioconjug. Chem. 7, 88-95; Chrisey, L. A., et al. (1996). Nucleic Acids Res. 24(15), 3031-3039; Kuijpers, W. H., et al. (1993). Bioconjug. Chem. 4(1), 94-102; Brinkley, M. A. (1992). A survey of methods for preparing protein conjugates with dyes, haptens and crosslinking reagents. Bioconjugate Chem. 3, 2-13; Hashida, S., et al. (1984). More useful maleimide compounds for the conjugation of Fab to horseradish peroxidase through thiol groups in the hinge. J. Appl. Biochem. 6, 56-63; Mattson, G., et al. (1993). A practical approach to crosslinking. Molecular Biology Reports 17, 167-183; Partis, M. D., et al. (1983). Crosslinking of proteins by omega-maleimido alkanoyl N-hydroxysuccinimide esters. J. Protein. Chem. 2, 263-277; Samoszuk, M. K., et al. (1989). A peroxide-generating immunoconjugate directed to eosinophil peroxidase is cytotoxic to Hodgkin's disease cells in vitro. Antibody, Immunoconjugates and Radiopharmaceuticals 2, 37-45; Yoshitake, S., et al. (1982). Mild and efficient conjugation of rabbit Fab and horseradish peroxidase using a maleimide compound and its use for enzyme immunoassay. J. Biochem. 92, 1413-1424.

[0203] Further heterobifunctional cross-linkers can be used in a similar fashion, e.g., ([N-ε-maleimidocaproyloxy]succinimide ester, N-[γ-maleimidobutyryloxy]succinimide ester, N-[κ-maleimidoundecanoyloxy]sulfosuccinimide ester, m-maleimidobenzoyl-N-hydroxysuccinimide ester (MBS), or their sulfosuccinimide analogs (e.g. sulfo-MBS).

[0204] A further example of a heterobifunctional cross-linker that can be used to form a cross-link between the amine of, e.g., a Lys side chain and the free —SH of, e.g., a Cys side chain, is succinimidyl-6-[(3-(2-pyridyldithio)-propionate]-hexanoate (LC-SPDP) or sulfo-LC-SPDP. The amine-reactive N-hydroxysuccinimide (NHS) ester will react with an amino group (e.g., that of a Lys residue) to form a stable amide bond. The resulting peptide has a pyridyldisulfide group that will then react with a sulfhydryl group of the same peptide (e.g., that of a Cys residue) to form a disulfide bond, thereby establishing the covalent linkage. This chemistry is well described in the literature; see for instance: Carlsson, J., et al. (1978) Biochem. J. 173, 723-737; Stan, R. V. (2004) Am. J. Physiol. Heart Circ. Physiol. 286, H1347-H1353; Mader, C., et al. (2004) J. Bacteriol. 186, 1758-1768.

[0205] Further heterobifunctional cross-linkers can be used in a similar fashion, e.g., 4-succinimidyloxycarbonyl-α-methyl-α-(2-pyridyldithio)-toluene (SMPT) or sulfo-SMPT, N-succinimidyl-3-(2-pyridyldithio)-propionate (SPDP) or sulfo-SPDP.

[0206] A further example of a heterobifunctional cross-linker that can be used to form a cross-link between the amine of, e.g., a Lys side chain and the free —SH of, e.g., a Cys side chain is N-succinimidyl-S-acetylthioacetate (SATA) or sulfo-SATA. The amine-reactive N-hydroxysuccinimide (NHS) ester will react with an amino group (e.g., that of a Lys residue) to form a stable amide bond. The protected —SH group of the resulting peptide will then be deprotected by treatment with hydroxylamine, and the resulting free —SH will then react with a sulfhydryl group of the same peptide (e.g., that of a Cys residue) to form a disulfide bond, thereby establishing the covalent linkage.

[0207] Further heterobifunctional cross-linkers can be used in a similar fashion, e.g., N-succinimidyl-S-acetylthiopropionate or its sulfosuccinimide analog.

[0208] Further suitable heterobifunctional cross-linkers include N-succinimidyl-(4-iodoacetyl)-aminobenzoate (SIAB) or sulfo-SIAB.

[0209] Specific, stepwise cross-linkages can also be formed between amino (—NH₂) and carboxy (—COOH) groups.

[0210] For instance, 1-ethyl-3-(3-dimethylaminopropyl)-carbodiimide hydrochloride (EDC) can be used to form a cross-link between the amine of, e.g., a Lys side chain and the free —COOH of an acidic side chain. The carboxy-reactive carbodiimide will react with an carboxy group (e.g., that of an Asp, Glu, Dab (2,4-diaminobutyric acid), Dap (2,4-diaminopropionic acid), or ornithine residue) to form an unstable o-acylisourea ester. The reactive o-acylisourea ester will then react with an amino group of the same peptide (e.g., that of a Lys residue) to form an amide bond, thereby establishing the covalent linkage. Alternatively, the reactive o-acylisourea ester may be reacted with N-hydroxysuccinimide, N-hydroxysulfosuccinimide or sulfo-N-hydroxysulfosuccinimide to give the semi-stable amine-reactive NHS ester which will then react with an amino group of the same peptide (e.g., that of a Lys residue) to form an amide bond, thereby establishing the covalent linkage. This chemistry is well described in the literature; see for instance: DeSilva, N. S. (2003) Interactions of Surfactant Protein D with Fatty Acids. Am. J. Respir. Cell Mol. Biol. 29, 757-770; Grabarek, Z. and Gergely, J. (1990) Zero-length crosslinking procedure with the use of active esters. Anal. Biochem. 185, 131-135; Sinz, A. (2003). J. Mass Spectrom. 38, 1225-1237. Staros, J. V., Wright, R. W. and Swingle, D. M. (1986) Enhancement by N-hydroxysulfosuccinimide of water-soluble carbodiimide-mediated coupling reactions. Anal. Biochem. 156, 220-222; Taniuchi, M., et al. (1986). Induction of nerve growth factor receptor in Schwann cells after axotomy. Proc. Natl. Acad. Sci. USA 83, 4094-4098.

[0211] Heterobifunctional cross-linkers also include the reaction of Lys(N3) and propargyl glycine amino acids. This reaction can be performed in solution or on resin (as described, for instance, in Jiang, S., (2008) Curr. Org. Chem. 12, 1502-1542 and references therein).

[0212] A particular class of cross-linkers, in particular heterobifunctional cross-linkers, includes photoreactive cross-linkers.

[0213] For instance, (SDA) can be used to form a cross-link between the amine of, e.g., a Lys side chain and the amine of, e.g., another Lys side chain. The amine-reactive N-hydroxysuccinimide (NHS) ester will react with an amino group (e.g., that of a Lys residue) to form a stable amide bond. The resulting peptide has a photo-labile diazirine moiety that, upon exposure to UV light, will react with an amino group (e.g., that of a Lys residue) of the same peptide to form a stable bond, thereby establishing the covalent linkage.

[0214] Further suitable photoreactive cross-linkers include bis-[β-(4-azidosalicylamido)-ethyl]-disulfide (BASED) and N-succinimidyl-6-(4′-azido-2′-nitrophenyl-amino)-hexanoate (SAN-PAH).

[0215] In addition to the heterobifunctional cross-linkers, there exist a number of other cross-linking agents including homobifunctional cross-linkers.

[0216] These include homobifunctional cross-linkers for forming linkages between two amino (—NH₂) groups.

[0217] For instance, disuccinimidyl suberate (DSS) can be used to form a cross-link between the amine of, e.g., a Lys side chain and the amine of, e.g., another Lys side chain. The amine-reactive N-hydroxysuccinimide (NHS) ester will react with an amino group (e.g., that of a Lys residue) to form a stable amide bond. The resulting peptide will then react with another amine group of the same peptide (e.g., that of a Lys residue) to form a further stable amide bond, thereby establishing the covalent linkage.

[0218] Further suitable homobifunctional cross-linkers include bismaleimidohexane (BMH) and dimethylpimelimidate (DMP).

[0219] Further suitable homobifunctional cross-linkers include a methylenedithioether linkage between two cysteines. The reaction of the peptide with TBAF (tetrabutylammonium fluoride) can be performed on resin containing the partially deprotected peptide followed by cleavage (see, for instance, Ueki et al., (1999) Bioorg. Med. Chem. Lett., 9, 1767-1772, and Ueki et al. in Peptide Science, 1999, 539-541).

[0220] Further suitable homobifunctional cross-linking systems include ring closing metathesis reactions between allylglycines (see, for instance, Wels, B. et al., (2005) Bioorg. Med. Chem. 13, 4221-4227) or modified amino acids, e.g. (S)-Fmoc-α(2′ pentenyl)alanine (see, for instance, Walensky, L. D., et al., (2004) Science 305, 1466-1470; Schafineister, C. E., et al., (2000) J. Am. Chem. Soc. 122, 5891-5892; Qiu, W., et al., (2000) Tetrahedron 56, 2577-2582; Belokon, Y. N., et al., (1998) Tetrahedron: Asymmetry, 9, 4249-4252); Qiu W., (2008) Anaspec poster at 20th American Peptide Society Annual Meeting). These reactions can be performed in solution on the protected peptide fragment or on the resin, respectively.

[0221] Homo- and heterobifunctional cross-linker may comprise a spacer arm or bridge. The bridge is the structure that connects the two reactive ends. The most apparent attribute of the bridge is its effect on steric hindrance. In some instances, a longer bridge can more easily span the distance necessary to link two amino acid residues.

[0222] While one covalent linkage between 2 non-contiguous amino acid residues may provide sufficient stabilization, the amyloid β peptide analogues of the invention may comprise more than one covalent linkage.

[0223] The present invention also relates to oligomers comprising a plurality of amyloid β peptide analogues as defined herein.

[0224] The term “oligomer” here refers to a non-covalent association of two or more amyloid β peptide analogues as defined herein, possessing homogeneity and distinct physical characteristics. According to one aspect, oligomers are stable, non-fibrillar, oligomeric assemblies of amyloid β peptide analogues. According to one embodiment, said assemblies comprise 2 to 28 amyloid β peptide analogues.

[0225] Such oligomers may be further characterized by particular interactions between two or amyloid β peptide analogues.

[0226] For instance, it is preferred if the amino acid sequence of each amyloid β peptide analogue comprises the sequence L₃₄M₃₅V₃₆G₃₇G₃₈, with the sequence L^{A}₃₄M^{A}₃₅V^{A}₃₆G^{A}₃₇G^{A}₃₈ of one amyloid β peptide analogue (A) being in parallel orientation to the sequence L^{B}₃₄M^{B}₃₅V^{B}₃₆G^{B}₃₇G^{B}₃₈ of another amyloid β peptide analogue (B). More particularly, it is preferred if the interproton distance for at least one atom pair selected from the group consisting of M^{A}₃₅(NH)—V^{B}₃₆(NH), G^{A}₃₇(NH)-G^{B}₃₈(NH), L^{A}₃₄(NH)-L^{B}₃₄(C_{δ}H₃), M^{A}₃₅(NH)—V^{B}₃₆(CγH₃) is 1.8 to 6.5 Angstroms.

[0227] According to a further particular embodiment, the invention relates to oligomers wherein the amino acid sequence of each amyloid β peptide analogue comprises the sequence G₃₃L₃₄M₃₅V₃₆G₃₇G₃₈V₃₉, with the sequence G^{A}₃₃L^{A}₃₄M^{A}₃₅V^{A}₃₆G^{A}₃₇G^{A}₃₈V^{A}₃₉ of one amyloid β peptide analogue (A) being in parallel orientation to the sequence G^{B}₃₃L^{B}₃₄M^{B}₃₅V^{B}₃₆G^{B}₃₇G^{B}₃₈V^{B}₃₉ of another amyloid β peptide analogue (B). More particularly, it is preferred if the interproton distance for at least one atom pair selected from the group consisting of G^{A}₃₃(NH)-G^{B}₃₄(NH), M^{A}₃₅(NH)—V^{B}₃₆(NH), G^{A}₃₇(NH)-G^{B}₃₈(NH), L^{A}₃₄(NH)-L^{B}₃₄(C_{δ}H₃), M^{A}₃₅(NH)—V^{B}₃₆(CγH₃), G^{A}₃₈(NH)—V^{B}₃₉(CγH₃) and V^{A}₃₉(NH)—V^{B}₃₉(CγH₃) is 1.8 to 6.5 Angstroms.

[0228] Further, it is preferred if the oligomer comprises an inter-molecular parallel β-sheet formed by β-strands of different amyloid β peptide analogues. According to a further particular embodiment, the β-sheet comprises the amino acid sequence G^{A}₃₃L^{A}₃₄M^{A}₃₅V^{A}₃₆G^{A}₃₇G^{A}₃₈V^{A}₃₉ of one amyloid β peptide analogue (A) and the amino acid sequence G^{A}₃₃L^{A}₃₄M^{A}₃₅V^{A}₃₆G^{A}₃₇G^{A}₃₈V^{A}₃₉ of another amyloid β peptide analogue (B). More particularly, it is preferred if the atom pairs G^{A}33(CO)-L^{B}34(N), L^{B}34(CO)-M^{A}35(N), M^{A}35(CO)—V^{B}36(N), V^{B}36(CO)-G^{A}37(N), and G^{B}37(CO)-G^{A}38(N) are at a distance of 3.3±0.5 Å, wherein CO indicates the backbone oxygen atom, and the phi (φ) angles of the residues range from −180 to −30 and psi (ψ) angles of the residues range from approximately 60 to 180 or from approximately −180 to −150.

[0229] Interproton distances defining the structure of the antiparallel β-sheet can be determined by the intra-molecular nuclear Overhauser effects (NOEs) between the backbone amides and between the backbone amides and side chains.

[0230] Interproton distances defining the structure of the parallel β-sheet can be determined by inter-molecular NOEs between backbone NH—NH and between backbone NH and methyl groups of the side chains.

[0231] The intra- vs. inter-molecular NOEs can be distinguished using different isotope-labeled samples, as described, for instance in WO2007/064917, in particular Example V, part G, NMR Features, which is incorporated herein by reference.

[0232] Using the NOE-derived distance restraints from the analysis of the NMR data, structures can be calculated, e.g. using the program CNX [A. T. Brunger, et al., Acta Crystallogr. D54 (Pt 5), 905-21, (1998)] by using a simulated annealing protocol [M. Nilges, et al., FEBS Lett. 229, 317-324, (1988)], thereby providing further intra-molecular and/or inter-molecular distances between two atoms.

[0233] According to a further particular embodiment, the amyloid β peptide analogues or oligomers of the invention are characterized by their reactivity with particular antibodies. Such antibodies include in particular antibodies having a binding affinity to an Aβ(20-42) truncated globulomer that is greater than the binding affinity of the antibody to an Aβ(1-42) globulomer.

[0234] The term “Aβ(X-Y) globulomer” (Aβ(X-Y) globular oligomer) here refers to a soluble, globular, non-covalent association of Aβ(X-Y) peptides as defined herein, possessing homogeneity and distinct physical characteristics. According to one aspect, Aβ(X-Y) globulomers are stable, non-fibrillar, oligomeric assemblies of Aβ(X-Y) peptides. In contrast to monomer and fibrils, these globulomers are characterized by defined assembly numbers of subunits (e.g. early assembly forms, n=4-6, “oligomers A”, and late assembly forms, n=12-14, “oligomers B”, as described in WO2004/067561). The globulomers have a 3-dimensional globular type structure (“molten globule”, see Barghorn et al., 2005, J Neurochem, 95, 834-847). They may be further characterized by one or more of the following features:
[0235] cleavability of N-terminal amino acids X-23 with promiscuous proteases (such as thermolysin or endoproteinase GluC) yielding truncated forms of globulomers;
[0236] non-accessibility of C-terminal amino acids 24-Y with promiscuous proteases and antibodies;
[0237] truncated forms of these globulomers maintain the 3-dimensional core structure of said globulomers with a better accessibility of the core epitope Aβ(20-Y) in its globulomer conformation.

[0238] The term “Aβ(X-Y) globulomer” also includes the N-Met Aβ(X-Y) globulomers described in WO2007/064917.

[0239] The term “Aβ(X-Y) truncated globulomer” here refers to a truncated form of Aβ(X-Y) globulomer which can be obtained by subjecting Aβ(X-Y) globulomer to limited proteolytic digestion. More specifically, Aβ(X-Y) truncated globulomers include N-terminally truncated forms wherein X is selected from the group consisting of the numbers 2 . . . 24, with X preferably being 20 or 12, and Y is as defined herein, which are obtainable by truncating Aβ(1-Y) globulomers by treatment with appropriate proteases. For instance, an Aβ(20-42) globulomer can be obtained by subjecting an Aβ(1-42) globulomer to thermolysin proteolysis, and an Aβ(12-42) globulomer can be obtained by subjecting an Aβ(1-42) globulomer to endoproteinase GIuC proteolysis. When the desired degree of proteolysis is reached, the protease is inactivated in a generally known manner. The resulting globulomers may then be isolated following the procedures already described herein and, if required, processed further by further work-up and purification steps. A detailed description of said processes is disclosed in WO 2004/067561, which is incorporated herein by reference.

[0240] For the purposes of the present invention, an Aβ(1-42) globulomer is in particular the Aβ(1-42) globulomer as described in reference example 1 herein; an N-Met Aβ(1-42) globulomer is in particular the N-Met Aβ(1-42) globulomer as described in reference example 2; an Aβ(20-42) truncated globulomer is in particular the Aβ(20-42) truncated globulomer as described in reference example 3 herein, and an Aβ(12-42) truncated globulomer is in particular the Aβ(12-42) truncated globulomer as described in reference example 4 herein.

[0241] Antibodies having a binding affinity to an Aβ(20-42) truncated globulomer that is greater than the binding affinity of the antibody to an Aβ(1-42) globulomer are described in WO 2007/062852 and include, for instance, a monoclonal antibody selected from the group consisting of 7C6, 7E5, 4D10 and 5F7.

[0242] According to a particular embodiment, the said antibody binds to the amyloid β peptide analogues or oligomers of the invention with a K_{D} in the range of at least 1×10⁻⁶ M. Preferably, the antibodies bind to the amyloid β peptide analogues or oligomers of the present invention with high affinity, for instance with a K_{D} of 1×10⁻⁷ M or greater affinity, e.g. with a K_{D} of 3×10⁻⁸ M or greater affinity, with a K_{D} of 1×10⁻⁸ M or greater affinity, e.g. with a K_{D} of 3×10⁻⁹ M or greater affinity, with a K_{D} of 1×10⁻⁹ M or greater affinity, e.g. with a K_{D} of 3×10⁻¹⁰ M or greater affinity, with a K_{D} of 1×10⁻¹⁰ M or greater affinity, e.g. with a K_{D} of 3×10⁻¹¹ M or greater affinity, or with a K_{D} of 1×10⁻¹¹ M or greater affinity.

[0243] The term “greater affinity” here refers to a degree of interaction where the equilibrium between unbound antibody and unbound amyloid β peptide analogue or oligomer on the one hand and antibody-amyloid β peptide analogue/oligomer complex on the other is further in favour of the antibody-amyloid β peptide analogue/oligomer complex. Likewise, the term “smaller affinity” here refers to a degree of interaction where the equilibrium between unbound antibody and unbound amyloid β peptide analogue or oligomer on the one hand and antibody-amyloid β peptide analogue/oligomer complex on the other is further in favour of the unbound antibody and unbound amyloid β peptide analogue or oligomer. The term “greater affinity” is synonymous with the term “higher affinity” and term “smaller affinity” is synonymous with the term “lower affinity”.

[0244] The binding affinities of antibodies (monoclonal or polyclonal) to a given antigen (such as amyloid β peptide analogues or oligomers of the present invention) may be evaluated by using standardized in-vitro immunoassays such as ELISA, dot blot or BIAcore analyses (Pharmacia Biosensor AB, Uppsala, Sweden and Piscataway, N.J.). For further descriptions, see Jönsson, U., et al. (1993) Ann. Biol. Clin. 51:19-26; Jönsson, U., et al. (1991) Biotechniques 11:620-627; Johnsson, B., et al. (1995) J. Mol. Recognit. 8:125-131; and Johnsson, B., et al. (1991) Anal. Biochem. 198:268-277.

[0245] According to a particular embodiment, the affinities defined herein refer to the values obtained by performing a dot blot as described in example 12 and evaluating it by densitometry. According to a particular embodiment of the invention, determining the binding affinity by dot blot comprises the following: a certain amount of the antigen or, expediently, an appropriate dilution thereof, for instance in 20 mM NaH₂PO₄, 140 mM NaCl, pH 7.4, 0.2 mg/ml BSA to an antigen concentration of, for example, 100 pmol/μl, 10 pmol/μl, 1 pmol/μl, 0.1 pmol/μl and 0.01 pmol/μl, is dotted onto a nitrocellulose membrane, the membrane is then blocked with milk to prevent unspecific binding and washed, then contacted with the antibody of interest followed by detection of the latter by means of an enzyme-conjugated secondary antibody and a colorimetric reaction; at defined antibody concentrations, the amount of antibody bound allows affinity determination. Thus the relative affinity of two different antibodies to one target, or of one antibody to two different targets, is here defined as the relation of the respective amounts of target-bound antibody observed with the two antibody-target combinations under otherwise identical dot blot conditions. Unlike a similar approach based on Western blotting, the dot blot approach will determine an antibody's affinity to a given target in the latter's natural conformation.

[0246] The term “K_{d}”, as used herein, is intended to refer to the dissociation constant of a particular antibody-antigen interaction as is known in the art.

[0247] Amyloid β peptide analogues or oligomers of the present invention that react with globulomer-specific antibodies are believed to display at least one globulomer epitope. Therefore, the amyloid β peptide analogues or oligomers of the present invention are capable of eliciting an immune response having a similar profil as the immune response elicited when Aβ(20-42) truncated globulomers or other truncated globulomers are used as immunogen.

[0248] The term “epitope” includes any polypeptide determinant capable of specific binding to an immunoglobulin. In certain embodiments, epitope determinants include chemically active surface groupings of molecules such as amino acids, sugar side chains, phosphoryl, or sulfonyl, and, in certain embodiments, may have specific three dimensional structural characteristics, and/or specific charge characteristics. An epitope is a region of an antigen that is bound by an antibody. An epitope may also be recognized by other binding agents than immunoglobulins.

[0249] According to a further particular embodiment, the amyloid β peptide analogues or oligomers of the invention are characterized by their ability of eliciting such a particular immune response, for instance if a mammal, e.g. a rabbit or a mouse, is immunized with an oligomer or derivative of the invention.

[0250] An immune response may be regarded as a mixture of antibodies resulting from challenging (immunizing) a host with an antigen (the immunogen). Said mixture of antibodies can be obtained from the host and is hereinafter referred to as the polyclonal antiserum.

[0251] In one aspect, such a particular immune response, i.e., the corresponding polyclonal antiserum, is characterized by comprising an antibody having a binding affinity to an amyloid β peptide analogue or oligomer of the invention or to an Aβ(20-42) truncated globulomer that is greater than the binding affinity of the antibody to at least one Aβ form selected from the group consisting of monomeric Aβ(1-42), monomeric Aβ(1-40), monomeric Aβ(20-42), fibrillomeric Aβ(1-42), fibrillomeric Aβ(1-40) and Aβ(1-42) globulomer.

[0252] According to a particular embodiment, the immune response, i.e., the corresponding polyclonal antiserum, is characterized by having an affinity to an amyloid β peptide analogue or oligomer of the invention or to an Aβ(20-42) truncated globulomer which is at least 2 times, e.g. at least 3 times or at least 5 times, preferably at least 10 times, e.g. at least 20 times, at least 30 times or at least 50 times, more preferably at least 100 times, e.g. at least 200 times, at least 300 times or at least 500 times, and even more preferably at least 1000 times, e.g. at least 2000 times, at least 3000 times or at least 5000 times, even more preferably at least 10000 times, e.g. at least 20000 times, at least 30000 or at least 50000 times, and most preferably at least 100000 times greater than the binding affinity of the antiserum to at least one Aβ form selected from the group consisting of monomeric Aβ(1-42), monomeric Aβ(1-40), monomeric Aβ(20-42), fibrillomeric Aβ(1-42), fibrillomeric Aβ(1-40) and Aβ(1-42) globulomer.

[0253] The term “Aβ(X-Y) monomer” or “monomeric Aβ(X-Y)” here refers to the isolated form of the Aβ(X-Y) peptide, preferably a form of the Aβ(X-Y) peptide which is not engaged in essentially non-covalent interactions with other Aβ peptides. It represents the essentially unfolded peptide which does not display a globulomer epitope. Practically, the Aβ(X-Y) monomer is usually provided in the form of an aqueous solution. In a particularly preferred embodiment of the invention, the aqueous monomer solution contains 0.05% to 0.2%, more preferably about 0.1% NH₄OH. In another particularly preferred embodiment of the invention, the aqueous monomer solution contains 0.05% to 0.2%, more preferably about 0.1% NaOH. When used (for instance for determining the binding affinities of the antibodies of the present invention), it may be expedient to dilute said solution in an appropriate manner. Further, it is usually expedient to use said solution within 2 hours, in particular within 1 hour, and especially within 30 minutes after its preparation.

[0254] More specifically, the term “Aβ(1-40) monomer” here refers to an Aβ(1-40) monomer preparation as described in reference example 5 herein, and the term “Aβ(1-42) monomer” here refers to an Aβ(1-42) preparation as described in reference example 6 herein.

[0255] In another aspect, such an immune response is characterized by comprising an antibody having a binding affinity to an amyloid β peptide analogue or oligomer of the invention or to an Aβ(20-42) truncated globulomer that is greater than the binding affinity of the antibody to an Aβ(1-42) globulomer.

[0256] The term “fibril” here refers to a molecular structure that comprises assemblies of non-covalently associated, individual Aβ(X-Y) peptides, which show fibrillary structure in the electron microscope, which bind Congo red and then exhibit birefringence under polarized light and whose X-ray diffraction pattern is a cross-G3 structure.

[0257] In another aspect of the invention, a fibril is a molecular structure obtainable by a process that comprises the self-induced polymeric aggregation of a suitable Aβ peptide in the absence of detergents, e.g. in 0.1 M HCl, leading to the formation of aggregates of more than 24, preferably more than 100 units. This process is well known in the art. Expediently, Aβ(X-Y) fibrils are used in the form of an aqueous solution. In a particularly preferred embodiment of the invention, the aqueous fibril solution is made by dissolving the Aβ peptide in 0.1% NH₄OH, diluting it 1:4 with 20 mM NaH₂PO₄, 140 mM NaCl, pH 7.4, followed by readjusting the pH to 7.4, incubating the solution at 37° C. for 20 h, followed by centrifugation at 10,000 g for 10 min and resuspension in 20 mM NaH₂PO₄, 140 mM NaCl, pH 7.4.

[0258] The term “Aβ(X-Y) fibril” here refers to a fibril consisting essentially of Aβ(X-Y) subunits, where it is preferred if on average at least 90% of the subunits are of the Aβ(X-Y) type, more preferred if at least 98% of the subunits are of the Aβ(X-Y) type, and most preferred if the content of non-Aβ(X-Y) peptides is below the detection threshold.

[0259] More specifically, the term “Aβ(1-42) fibril” here refers to a Aβ(1-42) fibril preparation as described in reference example 7 herein.

[0260] The present invention also relates to a purified amyloid β peptide analogue or oligomer of the invention. According to one embodiment of the present invention, a purified amyloid β peptide analogue or oligomer is one which has a purity of more than 80% by weight of total Aβ peptide, preferably of more than 90% by weight of total Aβ peptide, preferably of more than 95% by weight of total Aβ peptide.

[0261] It may be expedient that the amyloid β peptide analogues or oligomers of the invention comprise, in addition to the amyloid β-derived amino acid sequence or peptidomimetic thereof, one or more further moieties. For instance, diagnostic applications may require labelling the amyloid β peptide analogues or oligomers. Also, in active immunization it may be of advantage to attach moieties which prove expedient in active immunization applications.

[0262] Thus, the present invention also relates to amyloid β peptide analogues or oligomers, as defined herein, which comprise a covalently linked group that facilitates detection, preferably a fluorophore, e.g. fluorescein isothiocyanate, phycoerythrin, Alexa-488, Aequorea victoria fluorescent protein, Dictyosoma fluorescent protein or any combination or fluorescence-active derivative thereof; a chromophore; a chemoluminophore, e.g. luciferase, preferably Photinus pyralis luciferase, Vibrio fischeri luciferase, or any combination or chemoluminescence-active derivative thereof; an enzymatically active group, e.g. peroxidase, e.g. horseradish peroxidase, or any enzymatically active derivative thereof; an electron-dense group, e.g. a heavy metal containing group, e.g. a gold containing group; a hapten, e.g. a phenol derived hapten; a strongly antigenic structure, e.g. peptide sequence predicted to be anti-genic, e.g. predicted to be antigenic by the algorithm of Kolaskar and Tongaonkar; a molecule which helps elicit an immune response to the amyloid β peptide analogue or oligomer, e.g., serum albumin, ovalbumin, keyhole limpet hemocyanin, thyroglobulin, a toxoid from bacteria such as tetanus toxoid and diphtheria toxoid, a naturally occurring T cell epitope, a naturally occurring T helper cell epitope; an artificial T-cell epitope such as the pan DR epitope (“PADRE”; WO 95/07707), or another immunostimulatory agent, e.g., mannan, tripalmitoyl-5-glycerine cysteine, and the like; an aptamer for another molecule; a chelating group, e.g. hexahistidinyl; a natural or nature-derived protein structure mediating further specific protein-protein interactions, e.g. a member of the fos/jun pair; a magnetic group, e.g. a ferromagnetic group; or a radioactive group, e.g. a group comprising 1H, 14C, 32P, 35S or 125I or any combination thereof. With a view to avoiding the unfavored pro-inflammatory immune response Th1-pathway, amyloid β peptide analogues or oligomers comprising a molecule which is capable of directing the immune response to the anti-inflammatory pathway (Th2-pathway), e.g. molecules comprising a B cell epitope such as PADRE are expected to provide particular advantages in active immunization (see also, Petrushina I., et al., The Journal of Neuroscience 2007, 27(46): 12721-12731; Woodhouse A., et al., Drugs Aging 2007; 24(2): 107-119).

[0263] Such groups and methods for linking them to peptides or peptidomimetics are known in the art.

[0264] The amyloid β peptide analogues and oligomers disclosed herein can be produced in a manner which known per se in the art.

[0265] In a first step, a peptide comprising the amino acid sequence of the desired amyloid β peptide analogue or a peptidomimetic thereof is provided.

[0266] Said peptide or peptidomimetic may be produced by chemical synthesis using various solid-phase techniques such as those described in G. Barany and R. B. Merrifield, “The Peptides: Analysis, Synthesis, Biology”; Volume 2—“Special Methods in Peptide Synthesis, Part A”, pp. 3-284, E. Gross and J. Meienhofer, Eds., Academic Press, New York, 1980; and in J. M. Stewart and J. D. Young, “Solid-Phase Peptide Synthesis”, 2nd Ed., Pierce Chemical Co., Rockford, Ill., 1984. This strategy is based on the Fmoc (9-Fluorenylmethyl methyloxycarbonyl) group for temporary protection of the α-amino group, in combination with the tert-butyl group for temporary protection of the amino acid side chains (see for example E. Atherton and R. C. Sheppard, “The Fluorenylmethoxycarbonyl Amino Protecting Group”, in “The Peptides: Analysis, Synthesis, Biology”; Volume 9-“Special Methods in Peptide Synthesis, Part C”, pp. 1-38, S. Undenfriend and J. Meienhofer, Eds., Academic Press, San Diego, 1987.

[0267] The peptides can be synthesized in a stepwise manner on an insoluble polymer support (also referred to as “resin”) starting from the C-terminus of the peptide. A synthesis is begun by appending the C-terminal amino acid of the peptide to the resin through formation of an amide or ester linkage. This allows the eventual release of the resulting peptide as a C-terminal amide or carboxylic acid, respectively. Alternatively, in cases where a C-terminal amino alcohol is present, the C-terminal residue may be attached to 2-Methoxy-4-alkoxybenzyl alcohol resin (SASRIN™, Bachem Bioscience, Inc., King of Prussia, Pa.) as described herein and, after completion of the peptide sequence assembly, the resulting peptide alcohol is released with LiBH₄ in THF (see J. M. Stewart and J. D. Young, supra, p. 92).

[0268] The C-terminal amino acid and all other amino acids used in the synthesis are required to have their α-amino groups and side chain functionalities (if present) differentially protected such that the α-amino protecting group may be selectively removed during the synthesis. The coupling of an amino acid is performed by activation of its carboxyl group as an active ester and reaction thereof with the unblocked α-amino group of the N-terminal amino acid appended to the resin. The sequence of α-amino group deprotection and coupling is repeated until the entire peptide sequence is assembled. The peptide is then released from the resin with concomitant deprotection of the side chain functionalities, usually in the presence of appropriate scavengers to limit side reactions. The resulting peptide is finally purified by reverse phase HPLC.

[0269] The synthesis of the peptidyl-resins required as precursors to the final peptides utilizes commercially available cross-linked polystyrene polymer resins (Novabiochem, San Diego, Calif.; Applied Biosystems, Foster City, Calif.). Preferred solid supports are: 4-(2′,4′-dimethoxyphenyl-Fmoc-aminomethyl)-phenoxyacetyl-p-methyl benzhydrylamine resin (Rink amide MBHA resin); 9-Fmoc-amino-xanthen-3-yloxy-Merrifield resin (Sieber amide resin); 4-(9-Fmoc)aminomethyl-3,5-dimethoxyphenoxy)valeryl-aminomethyl-Merrifield resin (PAL resin), for C-terminal carboxamides. Coupling of first and subsequent amino acids can be accomplished using HOBT or HOAT active esters produced from DIC/HOBT, HBTU/HOBT, BOP, PyBOP, or from DIC/HOAT, HATU/HOAT, respectively. Preferred solid supports are: 2-Chlorotrityl chloride resin and 9-Fmoc-amino-xanthen-3-yloxy-Merrifield resin (Sieber amide resin) for protected peptide fragments. Loading of the first amino acid onto the 2-chlorotrityl chloride resin is best achieved by reacting the Fmoc-protected amino acid with the resin in dichloromethane and DIEA. If necessary, a small amount of DMF may be added to facilitate dissolution of the amino acid.

[0270] The syntheses can be carried out by using a peptide synthesizer, such as an Advanced Chemtech Multiple Peptide Synthesizer (MPS396) or an Applied Biosystems Inc. peptide synthesizer (ABI 433a).

[0271] Alternatively, any other appropriate methodology known to those familiar with the art could be used, including: 1) synthesis of multiple copies of the desired peptide or peptidomimetic separated by the appropriate cleavage sites for enzymatic or chemical cleavage of peptide bonds, resulting in the desired peptide peptidomimetic, 2) recombinant expression of APP in any system known to those familiar with the art, and containing the amino acid sequence, followed by either enzymatic or chemical processing to yield the desired peptide, 3) recombinant expression of the desired peptide as a fusion protein in any system known to those familiar with the art, 4) recombinant expression of the desired peptide directly in any system known to those familiar with the art.

[0272] The recombinant expression of amyloid β peptides is described in WO2007/064917. Moreover, general methods for expression of heterologous proteins in recombinant hosts, chemical synthesis of polypeptides, and in vitro translation are well known in the art and are described further in Maniatis et al., Molecular Cloning: A Laboratory Manual (1989), 2nd Ed., Cold Spring Harbor, N.Y.; Berger and Kimmel, Methods in Enzymology, Volume 152, Guide to Molecular Cloning Techniques (1987), Academic Press, Inc., San Diego, Calif.; Merrifield, J. (1969) J. Am. Chem. Soc. 91: 501; Chaiken 1. M. (1981) CRC Crit. Rev. Biochem. 11: 255; Kaiser et al. (1989) Science 243: 187; Merrifield, B. (1986) Science 232: 342; Kent, S. B. H. (1988) Ann. Rev. Biochem. 57: 957; and Offord, R. E. (1980) Semisynthetic Proteins, Wiley Publishing).

[0273] In a second step, the peptide or peptidomimetic obtained is subjected to conditions that allow the linkage to form. The conditions will, of course, depend on the type of linkage to form and can easily be determined by the skilled artisan. Reference is made to description of linkages and their chemistry provided herein.

[0274] Oligomer synthesis additionally involves oligomer formation. Thus the second step will not only comprise linkage but also oligomer formation.

[0275] Conditions suitable for oligomer formation are described in, for instance, WO 2004/067561; WO 2006/094724; S. Barghorn et al., J. Neurochem. 95, 834 (2005) and WO2007/064917, which are incorporated herein by reference.

[0276] In principle, oligomer formation may precede linkage formation. This is advantageous if the pre-formed oligomer directs or promotes the linkages to be formed. Alternatively, linkage formation may precede oligomer formation. This is advantageous if pre-formed linkages direct or promote oligomer formation. Oligomer formation and linkage formation may also take place concomitantly.

[0277] Both the amyloid β peptide analogue and the oligomer may be prepared using a peptide or peptidomimetic which differs from the amino acid sequence or the peptidomimetic comprised by the final amyloid β peptide analogue or oligomer. For instance, the starting peptide may comprise additional amino acids at its C- and/or N-terminus which will then be removed during the synthesis, e.g., by proteolytic cleavage.

[0278] In one embodiment of the invention, oligomers are formed with a peptide or peptidomimetic thereof and subsequently stabilized by one or more intra-peptide or intra-peptidomimetic covalent bond(s). In this embodiment, it may be expedient to use a peptide rather than a peptidomimetic.

[0279] In another embodiment of the invention, oligomers are formed with a peptide or peptidomimetic thereof, stabilized by one or more intra-peptide or intra-peptidomimetic covalent bond(s), and subsequently processed by chemical or enzymatic means to a truncated form that better displays the relevant structural elements. Alternatively, oligomers are formed with a peptide or peptidomimetic thereof, processed by chemical or enzymatic means to a truncated form that better displays relevant structural elements, and subsequently stabilized by one or more intra-peptide or intra-peptidomimetic covalent bond(s). In these embodiments, it may be expedient to use a peptide rather than a peptidomimetic.

[0280] In still another embodiment of the invention, a peptide or peptidomimetic thereof is used to form the relevant structural elements, wherein the peptide or peptidomimetic would be held in the proper conformation by one or more intra-peptide or intra-peptidomimetic covalent bond(s), rather than by interaction with adjacent peptides or peptidomimetic in an oligomer. It is envisioned that these amyloid β peptide analogues, stabilized with the appropriate intra-peptide or intra-peptidomimetic covalent bond(s), will present the relevant structural elements as a monomer. In this embodiment, it may be expedient to use a peptidomimetic rather than a peptide.

[0281] The amyloid β peptide analogues or oligomers of the invention have many utilities. For instance, they can be used in: 1) immunization-based interventional therapies (e.g., amyloid β peptide analogues or oligomers may be used in active immunization to treat or prevent an amyloidosis); 2) diagnostic testing (e.g., the amyloid β peptide analogues or oligomers may be used to diagnose an amyloidosis; 3) providing agents such as antibodies and aptamers that bind to the amyloid β peptide analogues or oligomers; and 4) crystallographic or NMR-based structure-based design research for developing agents such as antibodies and aptamers that bind to the amyloid β peptide analogues or oligomers.

[0282] The term “amyloidosis” here denotes a number of disorders characterized by abnormal folding, clumping, aggregation and/or accumulation of particular proteins (amyloids, fibrous proteins and their precursors) in various tissues of the body. In Alzheimer's disease and Down's syndrome, nerve tissue is affected, and in cerebral amyloid angiopathy (CAA) blood vessels are affected. According to a particular embodiment of the present invention, an amyloidosis is selected from the group consisting of Alzheimer's disease (AD) and the amyloidosis of Down's syndrome.

[0283] In active immunization, Aβ(20-42) truncated globulomer was shown to be effective in reversing cognitive defects in Alzheimer Disease transgenic mice. The amyloid β peptide analogues or oligomers of the present invention are able to elicit an immune response whose profil is similar to the profil of the immune response elicited by Aβ(20-42) truncated globulomer.

[0284] Thus, the invention also relates to the amyloid β peptide analogue or oligomer as defined herein for therapeutic uses.

[0285] In one aspect, the invention relates to therapeutic compositions comprising an amyloid β peptide analogue or oligomer as defined herein. According to a particular embodiment, said compositions are pharmaceutical compositions which further comprise a pharmaceutical acceptable carrier.

[0286] In a further aspect, the invention relates to the use of the amyloid β peptide analogue or oligomer as defined herein for preparing a pharmaceutical composition for treating or preventing an amyloidosis.

[0287] In a preferred embodiment of the invention, the pharmaceutical composition is a vaccine for active immunization.

[0288] Accordingly, the invention also relates to a method of treating or preventing an amyloidosis in a subject in need thereof, which comprises administering the amyloid β peptide analogue or oligomer as defined herein to the subject.

[0289] In a preferred embodiment of the invention, administering the amyloid β peptide analogue or oligomer is for actively immunizing the subject against an amyloidosis.

[0290] In the context of active immunization, it is particularly preferred if the amyloid β peptide analogue or oligomer is not able to enter the patient's CNS in significant amounts.

[0291] It is also particularly preferred if the pharmaceutical composition comprising the amyloid β peptide analogue or oligomer is capable of inducing a strong immune response against Aβ oligomers, preferably a strong immune response directed against Aβ oligomers only, more preferably a strong non-inflammatory antibody-based immune response against Aβ oligomers only. Thus, in one embodiment of the invention the pharmaceutical composition comprises an immunological adjuvant, preferably an adjuvant and a signalling molecule, e.g. a cytokine, that directs the immune response towards the non-inflammatory, antibody-based type. Such adjuvants and signalling molecules are well known to those skilled in the art.

[0292] It is particularly preferred if the pharmaceutical composition for active immunization is administered via a route selected from the group consisting of the intravenous route, the intramuscular route, the subcutaneous route, the intranasal route, and by inhalation. It is also particularly preferred if the composition is administered by a method selected from injection, bolus infusion and continuous infusion, each of which may be performed once, repeatedly or in regular intervals.

[0293] In a particular embodiment of the invention, long-term continuous infusion is achieved by employing an implantable device. In a further particular embodiment of the invention, the composition is applied as an implantable sustained release or controlled release depot formulation. Suitable formulations and devices are known to those skilled in the art. The details of the method to be used for any given route will depend on the stage and severity of the disease and the overall medical parameters of the subject and are preferably decided upon individually at the treating physician's or veterinary's discretion.

[0294] In an especially preferred embodiment of the invention, the pharmaceutical composition for active immunization comprises one or more substances selected from the group consisting of pharmaceutically acceptable preservatives, pharmaceutically acceptable colorants, pharmaceutically acceptable protective colloids, pharmaceutically acceptable pH regulators and pharmaceutically acceptable osmotic pressure regulators. Such substances are described in the art.

[0295] In line with globulomer hypothesis, it is believed that subjects suffering from an amyloidosis develop an immune response against endogenous globulomer epitopes. As the amyloid β peptide analogues or oligomers of the present invention react with antibodies that are specifically reactive with said epitopes the oligomers are believed to display the same or a very similar epitope.

[0296] The invention thus also relates to the amyloid β peptide analogue or oligomer as defined herein for diagnostic uses.

[0297] In one aspect, the invention relates to diagnostic compositions comprising an amyloid β peptide analogue or oligomer as defined herein. According to a particular embodiment, said compositions are pharmaceutical compositions which further comprise a pharmaceutical acceptable carrier.

[0298] In a further aspect, the invention relates to the use of an amyloid β peptide analogue or oligomer as defined herein for preparing a composition for diagnosing an amyloidosis.

[0299] Accordingly, the invention also relates to a method of diagnosing an amyloidosis which comprises providing a sample from the subject suspected of having the amyloidosis, contacting the sample with an amyloid β peptide analogue or oligomer as defined herein for a time and under conditions sufficient for the formation of a complex comprising the amyloid β peptide analogue or oligomer and an antibody, the presence of the complex indicating the subject has the amyloidosis. According to a particular embodiment, at least the step of contacting the sample is carried out ex vivo and in particular in vitro.

[0300] Thus, the amyloid β peptide analogue or oligomer of the present invention may be used in a variety of diagnostic methods and assays.

[0301] According to one embodiment, the method of diagnosing an amyloidosis in a patient suspected of having this disease comprises the steps of: a) isolating a biological sample from the patient; b) contacting the biological sample with an amyloid β peptide analogue or oligomer for a time and under conditions sufficient for the formation of antibody/amyloid β peptide analogue or oligomer complexes; c) adding a conjugate to the resulting antibody/amyloid β peptide analogue or oligomer complexes for a time and under conditions sufficient to allow the conjugate to bind to the bound antibody, wherein the conjugate comprises an antibody attached to a signal generating compound capable of generating a detectable signal; and d) detecting the presence of antibodies which may be present in the biological sample by detecting a signal generated by the signal generating compound, the signal indicating a diagnosis of an amyloidosis in the patient. According to a particular embodiment, at least one of steps b), c) and d) is carried out ex vivo and in particular in vitro. According to a further particular embodiment, the method does not comprise step a).

[0302] According to a further embodiment, the method of diagnosing an amyloidosis in a patient suspected of having this disease comprises the steps of: a) isolating a biological sample from the patient; b) contacting the biological sample with anti-antibody specific for antibodies in the sample for a time and under conditions sufficient to allow for formation of anti-antibody/antibody complexes; b) adding a conjugate to resulting anti-antibody/antibody complexes for a time and under conditions sufficient to allow the conjugate to bind to bound antibody, wherein the conjugate comprises an amyloid β peptide analogue or oligomer of the present invention attached to a signal generating compound capable of generating a detectable signal; and c) detecting a signal generated by the signal generating compound, the signal indicating a diagnosis of an amyloidosis in the patient. According to a particular embodiment, at least one of said steps b) and c) is carried out ex vivo and in particular in vitro. According to a further particular embodiment, the method does not comprise step a).

[0303] More specifically, as the amyloid β peptide analogues or oligomers of the present invention display the globulomer epitope and the globulomer epitope is believed to be an endogenous antigen which gives rise to an endogenous immune response, diagnosis of amyloidoses can be related to the determination of the presence of auto-antibodies which specifically bind to the amyloid β peptide analogues or oligomers of the invention.

[0304] The invention thus also relates to the use of the amyloid β peptide analogue or oligomer as defined herein for preparing a composition for detecting in a subject auto-antibodies that bind to the oligomer or derivative. Accordingly, the invention also relates to a method of detecting auto-antibodies that bind to the amyloid β peptide analogue or oligomer in a subject, which method comprises administering to the subject amyloid β peptide analogue or oligomer as defined herein and detecting a complex formed by the antibody and the amyloid β peptide analogue or oligomer, the presence of the complex indicating the presence of the auto-antibodies. In a particular embodiment of the invention, the subject is suspected of having any form of amyloidosis, e.g. Alzheimer's disease, and detecting auto-antibodies is for diagnosing the presence or absence of any form of amyloidosis, e.g. Alzheimer's disease, in the subject.

[0305] The invention also relates to the use of the amyloid β peptide analogue or oligomer as defined herein for detecting auto-antibodies that bind to the oligomer or derivative in a sample. Accordingly, the invention also refers to a method of detecting auto-antibodies that bind to the Aβ amyloid β peptide analogue or oligomer in a sample, which method comprises contacting the sample with the amyloid β peptide analogue or oligomer as defined herein and detecting a complex formed by the antibody and the amyloid β peptide analogue or oligomer, the presence of the complex indicating the presence of the auto-antibodies. According to a particular embodiment, at least the step of contacting the sample is carried out ex vivo and in particular in vitro. In a preferred embodiment of the invention, the sample is derived from a subject suspected of having an amyloidosis, e.g. Alzheimer's disease, and detecting the auto-antibodies is for diagnosing the presence or absence of the amyloidosis, e.g. Alzheimer's disease in the subject. Suitable samples include biological fluids which may be tested by the aforesaid method. These include plasma, whole blood, dried whole blood, serum, cerebrospinal fluid or aqueous or organo-aqueous extracts of tissues and cells.

[0306] It is particularly preferred if the subject suspected of having an amyloidosis is a subject having the amyloidosis or having an increased risk of getting the amyloidosis.

[0307] According to a particular embodiment of the invention, detecting auto-antibodies as described herein further comprises a pre-treatment of the preparation (sample) which causes dissociation of auto-antibody/antigen complexes. A method comprising such a pre-treatment may therefore be used in order to determine the total amount of auto-antibodies present in the preparation (sample) while a method not comprising said pre-treatment may be used in order to determine the amount of auto-antibodies which can still bind to the antigen. Further, both methods will allow to indirectly determine the amount of complexed auto-antibodies.

[0308] Conditions suitable for inducing dissociation of auto-antibody/antigen complexes are known to the skilled person. For instance, treating the preparation (sample) with acid, e.g., using a buffer such that the pH of the resulting preparation (sample) is in the range of 1 to 5, preferably in the range of 2 to 4 and in particular in the range of 2 to 3, may be expedient. Suitable buffers include salts in a physiological concentration, e.g. NaCl and acetic acid. A method for separation of antibody/antigen complexes has been described in WO2005/037209, which is incorporated herein in its entirety.

[0309] Briefly, dissociating the antibody from the antigen in the antibody/antigen complex comprises the steps of: contacting the sample containing an antibody/antigen complex with a dissociation buffer; incubating the sample; and optionally concentrating the sample.

[0310] The dissociation buffer may be a PBS buffer which has a pH in the range as indicated herein. For instance a PBS buffer containing about 1.5% BSA and 0.2 M glycine-acetate pH 2.5, or 140 mM NaCl and 0.58% acetic acid is suitable.

[0311] Incubation for several minutes, for instance such as 10 to 30, e.g., 20 minutes at a temperature in the range of 20 to 40° C. has proven sufficient.

[0312] Concentration can be achieved in a manner known per se, for instance by passing the sample over a Centriprep YM30 (Amincon Inc.).

[0313] In one embodiment of the present invention, the amyloid β peptide analogue or oligomer, or a portion thereof is coated on a solid phase. The sample (e.g., whole blood, cerebrospinal fluid, serum, etc.) is then contacted with the solid phase. If the antibodies, e.g. the auto-antibodies, are present in the sample, such antibodies bind to the amyloid β peptide analogue or oligomer on the solid phase and are then detected by either a direct or indirect method. The direct method comprises simply detecting presence of the complex itself and thus presence of the antibodies. In the indirect method, a conjugate is added to the bound antibody. The conjugate comprises a second antibody, which binds to the first bound antibodies, attached to a signal-generating compound or label. Should the second antibody bind to a bound first antibody, the signal-generating compound generates a measurable signal. Such a signal then indicates presence of the first antibodies in the sample.

[0314] Examples of solid phases used in diagnostic immunoassays are porous and non-porous materials, latex particles, magnetic particles, microparticles (see U.S. Pat. No. 5,705,330), beads, membranes, microtiter wells and plastic tubes. The choice of the solid phase material and the method of labeling the antigen or antibodies present in the conjugate, if desired, are determined based upon desired assay format performance characteristics.

[0315] As noted herein, the conjugate (or indicator reagent) will comprise an antibody (or perhaps anti-antibodies, depending upon the assay), attached to a signal-generating compound or “label”. This signal-generating compound or label is itself detectable or may be reacted with one or more additional compounds to generate a detectable product. Examples of signal-generating compounds are described herein and in particular include chromophores, radio-isotopes (e.g., 125I, 131I, 32P, 3H, 35S and 14C), chemiluminescent compounds (e.g., acridinium), particles (visible or fluorescent), nucleic acids, complexing agents, or catalysts such as enzymes (e.g., alkaline phosphatase, acid phosphatase, horseradish peroxidase, beta-galactosidase and ribonuclease). In the case of enzyme use (e.g., alkaline phosphatase or horseradish peroxidase), addition of a chromo-, fluoro-, or lumo-genic substrate results in generation of a detectable signal. Other detection systems such as time-resolved fluorescence, internal-reflection fluorescence, amplification (e.g., polymerase chain reaction) and Raman spectroscopy are also useful.

[0316] Kits are also included within the scope of the present invention. More specifically, the present invention includes kits for determining the presence of antibodies such as auto-antibodies in a subject. In particular, a kit for determining the presence of said antibodies in a sample comprises a) a amyloid β peptide analogue or oligomer as defined herein; and optionally b) a conjugate comprising an antibody attached to a signal generating compound capable of generating a detectable signal. The kit may also contain a control or calibrator which comprises a reagent which binds to the antigen.

[0317] The present invention also includes another type of kit for detecting antibodies such as auto-antibodies in a sample. The kit may comprise a) an anti-antibody specific for the antibody of interest, and b) amyloid β peptide analogue or oligomer as defined herein. A control or calibrator comprising a reagent which binds to the amyloid β peptide analogue or oligomer may also be included. More specifically, the kit may comprise a) an anti-antibody specific for the auto-antibody and b) a conjugate comprising the amyloid β peptide analogue or oligomer, the conjugate being attached to a signal generating compound capable of generating a detectable signal. Again, the kit may also comprise a control or calibrator comprising a reagent which binds to the antigen.

[0318] The kit may also comprise one container such as a vial, bottle or strip, with each container with a pre-set solid phase, and other containers containing the respective conjugates. These kits may also contain vials or containers of other reagents needed for performing the assay, such as washing, processing and indicator reagents.

[0319] The amyloid β peptide analogues or oligomers of the invention are useful for providing agents that are capable of binding to the amyloid β peptide analogue or oligomer. Such agents include, e.g., antibodies (hereinafter also referred to as anti-oligomer antibody), non-antibody binding molecules (such as affibodies, affilin molecules, AdNectins, Anticalins, DARPins, domain antibodies, evibodies, knotins, Kunitz-type domains, maxibodies, tetranectins, trans-bodies, and V(NAR)s, as described, for instance, in the Handbook of Therapeutic Antibodies, ed. by Stefan Dübel, Volume II, Chapter 7, Wiley-VCH Verlag GmbH & Co. KGaA, Weinheim, 2007), aptamers or small-molecular weight compounds. In one aspect, the invention thus relates to the use of the amyloid β peptide analogue or oligomer for screening an agent that is capable of binding to the amyloid β peptide analogue or oligomer. Accordingly, the invention also relates to a method of identifying such agents, which method comprises the steps of: a) exposing one or more agents of interest to the amyloid β peptide analogue or oligomer described herein for a time and under conditions sufficient for the one or more agents to bind to the amyloid β peptide analogue or oligomer; and b) identifying those agents which bind to the amyloid β peptide analogue or oligomer.

[0320] In another aspect, the invention relates to the use of the amyloid β peptide analogue or oligomer for enriching an agent that is capable of binding to the amyloid β peptide analogue or oligomer in a preparation comprising said agent. Accordingly, the invention also relates to a method of enriching such an agent in a preparation comprising said agent, which method comprises the steps of: a) exposing to the amyloid β peptide analogue or oligomer the preparation comprising the agent that is capable of binding to the amyloid β peptide analogue or oligomer for a time and under conditions sufficient for the agent to bind to the amyloid β peptide analogue or oligomer; and b) obtaining the agent in enriched form. More particularly, the amyloid β peptide analogue or oligomer can be immobilized (for instance on a resin), which allows the agent to be captured. Obtaining the agent in enriched form may then comprise desorbing the captured agent, preferably in such a way that desorbing the captured agent comprises contacting the captured agent with a high salt buffer or an acidic solution. This method can, for instance, be used for enriching auto-antibodies as described herein by subjecting commercial immunoglobulin preparations like IVIG or Octagam® (Octa-pharma Inc. Vienna, Austria) to this method. It is believed that these immunoglobulin preparations contain auto-antibodies to AR, and by treating subjects one raises the level of anti-Aβ antibodies in their body. A preparation that is enriched for said auto-antibodies would be expected to be more efficacious.

[0321] In a further aspect, the invention thus relates to the use of the amyloid β peptide analogue or oligomer for providing an antibody that binds to the amyloid β peptide analogue or oligomer. Accordingly, the invention also relates to a method for providing an antibody that binds to the amyloid β peptide analogue or oligomer as defined herein, which method comprises:

a) providing an antigen comprising the amyloid β peptide analogue or oligomer;
b) exposing an antibody repertoire or potential antibody repertoire to said antigen; and
c) selecting from said repertoire an antibody which binds to said amyloid β peptide analogue or oligomer.

[0322] Here it is to be understood that a “potential antibody repertoire” refers to any library, collection, assembly or set of amino acid or corresponding nucleic acid sequences or to any generator of such a library, collection, assembly or set of amino acid sequences that can be used for producing an antibody repertoire in vivo or in vitro. In a preferred embodiment of the invention, the generator is the adaptive immune system of an animal, in particular the antigen-producing part of the immune system of a mammal which generates antibody diversity by a recombination process well known to those skilled in the art. In another preferred embodiment of the invention, the generator is a system for the spawning of random nucleic acid sequences which can then, by insertion into a suitable antibody framework, be used to produce an antibody repertoire in vitro.

[0323] In a preferred embodiment of the invention, the antibody repertoire or potential antibody repertoire is exposed to the antigen in vivo by immunizing an organism with said antigen. In another preferred embodiment of the invention, the potential antibody repertoire is a library of suitable nucleic acids which is exposed to the antibody by in vitro affinity screening as described in the art, e.g. a phage display and panning system.

[0324] In another aspect, the invention also provides antibodies that bind to the Aβ(X-38 . . . 43) amyloid β peptide analogue or oligomer as defined herein.

[0325] In a preferred embodiment of the invention, the antibody is obtainable by a method comprising selecting the antibody from a repertoire or potential repertoire as described herein.

[0326] According to a particularly preferred embodiment, the present invention provides amyloid β peptide analogue- or oligomer-specific antibodies. These include in particular antibodies having a comparatively smaller affinity for both the monomeric and fibrillomeric forms of Aβ peptide than for the amyloid β peptide analogue or oligomer of the invention. In certain embodiments, an antibody is said to specifically bind an antigen when it preferentially recognizes its target antigen in a complex mixture of proteins and/or macromolecules.

[0327] In a preferred embodiment of the invention, the affinity of the antibody to the amyloid β peptide analogue or oligomer is at least 2 times, e.g. at least 3 times or at least 5 times, preferably at least 10 times, e.g. at least 20 times, at least 30 times or at least 50 times, more preferably at least 100 times, e.g. at least 200 times, at least 300 times or at least 500 times, and even more preferably at least 1000 times, e.g. at least 2000 times, at least 3000 times or at least 5000 times, even more preferably at least 10000 times, e.g. at least 20000 times, at least 30000 or at least 50000 times, and most preferably at least 100000 times greater than the binding affinity of the antibody to a monomeric Aβ(1-42).

[0328] In a preferred embodiment of the invention, the affinity of the antibody to the amyloid β peptide analogue or oligomer is at least 2 times, e.g. at least 3 times or at least 5 times, preferably at least 10 times, e.g. at least 20 times, at least 30 times or at least 50 times, more preferably at least 100 times, e.g. at least 200 times, at least 300 times or at least 500 times, and even more preferably at least 1000 times, e.g. at least 2000 times, at least 3000 times or at least 5000 times, even more preferably at least 10000 times, e.g. at least 20000 times, at least 30000 or at least 50000 times, and most preferably at least 100000 times greater than the binding affinity of the antibody to a monomeric Aβ(1-40).

[0329] Expediently, the antibody of the present invention binds to one or, more preferably, both monomers with low affinity, most preferably with a K_{D} of 1×10⁻⁸ M or smaller affinity, e.g. with a K_{D} of 3×10⁻⁸ M or smaller affinity, with a K_{D} of 1×10⁻⁷ M or smaller affinity, e.g. with a K_{D} of 3×10⁻⁷ M or smaller affinity, or with a K_{D} of 1×10⁻⁶ M or smaller affinity, e.g. with a K_{D} of 3×10⁻⁵ M or smaller affinity, or with a K_{D} of 1×10⁻⁵ M or smaller affinity.

[0330] In a preferred embodiment of the invention, the affinity of the antibody to the amyloid β peptide analogue or oligomer is at least 2 times, e.g. at least 3 times or at least 5 times, preferably at least 10 times, e.g. at least 20 times, at least 30 times or at least 50 times, more preferably at least 100 times, e.g. at least 200 times, at least 300 times or at least 500 times, and even more preferably at least 1000 times, e.g. at least 2000 times, at least 3000 times or at least 5000 times, even more preferably at least 10000 times, e.g. at least 20000 times, at least 30000 or at least 50000 times, and most preferably at least 100000 times greater than the binding affinity of the antibody to a fibrillomeric Aβ(1-42).

[0331] In a preferred embodiment of the invention, the affinity of the antibody to the amyloid β peptide analogue or oligomer is at least 2 times, e.g. at least 3 times or at least 5 times, preferably at least 10 times, e.g. at least 20 times, at least 30 times or at least 50 times, more preferably at least 100 times, e.g. at least 200 times, at least 300 times or at least 500 times, and even more preferably at least 1000 times, e.g. at least 2000 times, at least 3000 times or at least 5000 times, even more preferably at least 10000 times, e.g. at least 20000 times, at least 30000 or at least 50000 times, and most preferably at least 100000 times greater than the binding affinity of the antibody to a fibrillomeric Aβ(1-40).

[0332] Expediently, the antibody of the present invention binds to one or, more preferably, both fibrils with low affinity, most preferably with a K_{D} of 1×10⁻⁸ M or smaller affinity, e.g. with a K_{D} of 3×10⁻⁸ M or smaller affinity, with a K_{D} of 1×10⁻⁷ M or smaller affinity, e.g. with a K_{D} of 3×10⁻⁷ M or smaller affinity, or with a K_{D} of 1×10⁻⁶ M or smaller affinity, e.g. with a K_{D} of 3×10⁻⁵ M or smaller affinity, or with a K_{D} of 1×10⁻⁵ M or smaller affinity.

[0333] The antibodies of the present invention are preferably isolated antibodies. An “isolated antibody” means an antibody having the binding affinities as described above and which is essentially free of other antibodies having different binding affinities. The term “essentially free” here refers to an antibody preparation in which at least 95% of the antibodies, preferably at least 98% of the antibodies and more preferably at least 99% of the antibodies have the desired binding affinity. Moreover, an isolated antibody may be substantially free of other cellular material and/or chemicals.

[0334] The isolated antibodies of the present invention include monoclonal antibodies. A “monoclonal antibody” as used herein is intended to refer to a preparation of antibody molecules, antibodies which share a common heavy chain and common light chain amino acid sequence, in contrast with “polyclonal” antibody preparations which contain a mixture of antibodies of different amino acid sequence. Monoclonal antibodies can be generated by several novel technologies like phage, bacteria, yeast or ribosomal display, as well as by classical methods exemplified by hybridoma-derived antibodies (e.g., an antibody secreted by a hybridoma prepared by hybridoma technology, such as the standard Kohler and Milstein hybridoma methodology ((1975) Nature 256:495-497). Thus, a non-hybridoma-derived antibody with uniform sequence is still referred to as a monoclonal antibody herein although it may have been obtained by non-classical methodologies, and the term “monoclonal” is not restricted to hybridoma-derived antibodies but used to refer to all antibodies derived from one nucleic acid clone.

[0335] Thus, the monoclonal antibodies of the present invention include recombinant antibodies. The term “recombinant” herein refers to any artificial combination of two otherwise separated segments of sequence, e.g., by chemical synthesis or by the manipulation of isolated segments of nucleic acids by genetic engineering techniques. In particular, the term “recombinant antibody” refers to antibodies which are produced, expressed, generated or isolated by recombinant means, such as antibodies which are expressed using a recombinant expression vector transfected into a host cell; antibodies isolated from a recombinant combinatorial antibody library; antibodies isolated from an animal (e.g. a mouse) which is transgenic due to human immunoglobulin genes (see, for example, Taylor, L. D., et al. (1992) Nucl. Acids Res. 20:6287-6295); or antibodies which are produced, expressed, generated or isolated in any other way in which particular immunoglobulin gene sequences (such as human immunoglobulin gene sequences) are assembled with other DNA sequences. Recombinant antibodies include, for example, chimeric, CDR graft and humanized antibodies. The person skilled in the art will be aware that expression of a conventional hybridoma-derived monoclonal antibody in a heterologous system will require the generation of a recombinant antibody even if the amino acid sequence of the resulting antibody protein is not changed or intended to be changed.

[0336] In a particular embodiment of the invention, the antibody is a humanized antibody.

[0337] According to a multiplicity of embodiments, the antibody may comprise an amino acid sequence derived entirely from a single species, such as a human antibody or a mouse antibody. According to other embodiments, the antibody may be a chimeric antibody or a CDR graft antibody or another form of a humanized antibody.

[0338] The term “antibody” is intended to refer to immunoglobulin molecules consisting of 4 polypeptide chains, two heavy (H) chains and two light (L) chains. The chains are usually linked to one another via disulfide bonds. Each heavy chain is composed of a variable region of said heavy chain (abbreviated here as HCVR or VH) and a constant region of said heavy chain. The heavy chain constant region consists of three domains CH1, CH2 and CH3. Each light chain is composed of a variable region of said light chain (abbreviated here as LCVR or VL) and a constant region of said light chain. The light chain constant region consists of a CL domain. The VH and VL regions may be further divided into hypervariable regions referred to as complementarity-determining regions (CDRs) and interspersed with conserved regions referred to as framework regions (FR). Each VH and VL region thus consists of three CDRs and four FRs which are arranged from the N terminus to the C terminus in the following order: FR1, CDR1, FR2, CDR2, FR3, CDR3, FR4. This structure is well known to those skilled in the art.

[0339] The term “antigen-binding moiety” of an antibody (or simply “antibody moiety”) refers to one or more fragments of an antibody of the invention, said fragment(s) still having the binding affinities as defined above. Fragments of a complete antibody have been shown to be able to carry out the antigen-binding function of an antibody. In accordance with the term “antigen-binding moiety” of an antibody, examples of binding fragments include (i) an Fab fragment, i.e. a monovalent fragment composed of the VL, VH, CL and CH1 domains; (ii) an F(ab′)₂ fragment, i.e. a bivalent fragment comprising two Fab fragments linked to one another in the hinge region via a disulfide bridge; (iii) an Fd fragment composed of the VH and CH1 domains; (iv) an Fv fragment composed of the FL and VH domains of a single arm of an antibody; (v) a dAb fragment (Ward et al., (1989) Nature 341:544-546) consisting of a VH domain or of VH, CH1, CH2, DH3, or VH, CH2, CH3; and (vi) an isolated complementarity-determining region (CDR). Although the two domains of the Fv fragment, namely VL and VH, are encoded by separate genes, they may further be linked to one another using a synthetic linker, e.g. a poly-G₄S amino acid sequence, and recombinant methods, making it possible to prepare them as a single protein chain in which the VL and VH regions combine in order to form monovalent molecules (known as single chain Fv (ScFv); see, for example, Bird et al. (1988) Science 242:423-426; and Huston et al. (1988) Proc. Natl. Acad. Sci. USA 85:5879-5883). The term “antigen-binding moiety” of an antibody is also intended to comprise such single chain antibodies. Other forms of single chain antibodies such as “diabodies” are likewise included here. Diabodies are bivalent, bispecific antibodies in which VH and VL domains are expressed on a single polypeptide chain, but using a linker which is too short for the two domains being able to combine on the same chain, thereby forcing said domains to pair with complementary domains of a different chain and to form two antigen-binding sites (see, for example, Holliger, P., et al. (1993) Proc. Natl. Acad. Sci. USA 90:6444-6448; Poljak, R. J., et al. (1994) Structure 2:1121-1123). An immunoglobulin constant domain refers to a heavy or light chain constant domain. Human IgG heavy chain and light chain constant domain amino acid sequences are known in the art.

[0340] Furthermore, an antibody of the present invention or antigen-binding moiety thereof may be part of a larger immunoadhesion molecule formed by covalent or noncovalent association of said antibody or antibody-binding moiety with one or more further proteins or peptides. Relevant to such immunoadhesion molecules are the use of the streptavidin core region in order to prepare a tetrameric scFv molecule (Kipriyanov, S. M., et al. (1995) Human Antibodies and Hybridomas 6:93-101) and the use of a cysteine residue, a marker peptide and a C-terminal polyhistidinyl, e.g. hexahistidinyl, tag in order to produce bivalent and biotinylated scFv molecules (Kipriyanov, S. M., et al. (1994) Mol. Immunol. 31:1047-1058).

[0341] The term “human antibody” refers to antibodies whose variable and constant regions correspond to or are derived from immunoglobulin sequences of the human germ line, as described, for example, by Kabat et al. (see Kabat, et al. (1991) Sequences of Proteins of Immunological Interest, Fifth Edition, U.S. Department of Health and Human Services, NIH Publication No. 91-3242). However, the human antibodies of the invention may contain amino acid residues not encoded by human germ line immunoglobulin sequences (for example mutations which have been introduced by random or site-specific mutagenesis in vitro or by somatic mutation in vivo), for example in the CDRs, and in particular in CDR3. Recombinant human antibodies of the invention have variable regions and may also contain constant regions derived from immunoglobulin sequences of the human germ line (see Kabat, E. A., et al. (1991) Sequences of Proteins of Immunological Interest, Fifth Edition, U.S. Department of Health and Human Services, NIH Publication No. 91-3242). According to particular embodiments, however, such recombinant human antibodies are subjected to in-vitro mutagenesis (or to a somatic in-vivo mutagenesis, if an animal is used which is transgenic due to human Ig sequences) so that the amino acid sequences of the VH and VL regions of the recombinant antibodies are sequences which although related to or derived from VH and VL sequences of the human germ line, do not naturally exist in vivo within the human antibody germ line repertoire. According to particular embodiments, recombinant antibodies of this kind are the result of selective mutagenesis or back mutation or of both. Preferably, mutagenesis leads to an affinity to the target which is greater, and/or an affinity to non-target structures which is smaller than that of the parent antibody.

[0342] The term “chimeric antibody” refers to antibodies which contain sequences for the variable region of the heavy and light chains from one species and constant region sequences from another species, such as antibodies having murine heavy and light chain variable regions linked to human constant regions.

[0343] The term “CDR-grafted antibody” refers to antibodies which comprise heavy and light chain variable region sequences from one species but in which the sequences of one or more of the CDR regions of VH and/or VL are replaced with CDR sequences of another species, such as antibodies having murine heavy and light chain variable regions in which one or more of the murine CDRs (e.g., CDR3) has been replaced with human CDR sequences.

[0344] The term “humanized antibody” refers to antibodies which contain sequences of the variable region of heavy and light chains from a nonhuman species (e.g. mouse, rat, rabbit, chicken, camelid, sheep or goat) but in which at least one part of the VH and/or VL sequence has been altered in order to be more “human-like”, i.e. to be more similar to variable sequences of the human germ line. One type of a humanized antibody is a CDR graft antibody in which human CDR sequences have been inserted into nonhuman VH and VL sequences to replace the corresponding nonhuman CDR sequences.

[0345] Methods of producing antibodies of the invention are described below. A distinction is made here between in-vivo approaches, in-vitro approaches or a combination of both.

[0346] Some methods of producing antibodies of the invention are described below. A distinction is made here between in-vivo approaches, in-vitro approaches or a combination of both.

### In-Vivo Approaches

[0347] Depending on the type of the desired antibody, various host animals may be used for in-vivo immunization. A host expressing itself an endogenous version of the antigen of interest may be used. Alternatively, it is possible to use a host which has been made deficient in an endogenous version of the antigen of interest. For example, mice which had been made deficient in a particular endogenous protein via homologous recombination at the corresponding endogenous gene (i.e. knockout mice) have been shown to generate a humoral response to the protein with which they have been immunized and therefore to be able to be used for production of high-affinity monoclonal antibodies to the protein (see, for example, Roes, J. et al. (1995) J. Immunol. Methods 183:231-237; Lunn, M. P. et al. (2000) J. Neurochem. 75:404-412).

[0348] A multiplicity of nonhuman mammals are suitable hosts for antibody production in order to produce nonhuman antibodies of the invention. They include mice, rats, chickens, camelids, rabbits, sheep and goats (and knockout versions thereof), although preference is given to mice for the production of hybridomas. Furthermore, a nonhuman host animal expressing a human antibody repertoire may be used for producing essentially human antibodies to a human antigen with dual specificity. Nonhuman animals of this kind include transgenic animals (e.g. mice) bearing human immunoglobulin transgenes (chimeric hu-PBMC SCID mice) and human/mouse irradiation chimeras which are described in more detail below.

[0349] According to one embodiment, the animal immunized with amyloid β peptide analogue or oligomer is a nonhuman mammal, preferably a mouse, which is transgenic due to human immunoglobulin genes so that said nonhuman mammal makes human antibodies upon anti-genic stimulation. Typically, immunoglobulin transgenes for heavy and light chains with human germ line configuration are introduced into such animals which have been altered such that their endogenous heavy and light chain loci are inactive. If such animals are stimulated with antigen (e.g. with a human antigen), antibodies derived from the human immunoglobulin sequences (human antibodies) are produced. It is possible to make from the lymphocytes of such animals human monoclonal antibodies by means of standardized hybridoma technology. For a further description of transgenic mice with human immunoglobulins and their use in the production of human antibodies, see, for example, U.S. Pat. No. 5,939,598, WO 96/33735, WO 96/34096, WO 98/24893 and WO 99/53049 (Abgenix Inc.), and U.S. Pat. No. 5,545,806, U.S. Pat. No. 5,569,825, U.S. Pat. No. 5,625,126, U.S. Pat. No. 5,633,425, U.S. Pat. No. 5,661,016, U.S. Pat. No. 5,770,429, U.S. Pat. No. 5,814,318, U.S. Pat. No. 5,877,397 and WO 99/45962 (Genpharm Inc.); see also MacQuitty, J. J. and Kay, R. M. (1992) Science 257:1188; Taylor, L. D. et al. (1992) Nucleic Acids Res. 20:6287-6295; Lonberg, N. et al. (1994) Nature 368:856-859; Lonberg, N. and Huszar, D. (1995) Int. Rev. Immunol. 13:65-93; Harding, F. A. and Lonberg, N. (1995) Ann. N.Y. Acad. Sci. 764:536-546; Fishwild, D. M. et al. (1996) Nature Biotechnology 14:845-851; Mendez, M. J. et al. (1997) Nature Genetics 15:146-156; Green, L. L. and Jakobovits, A. (1998) J. Exp. Med. 188:483-495; Green, L. L. (1999) J. Immunol. Methods 231:11-23; Yang, X. D. et al. (1999) J. Leukoc. Biol. 66:401-410; Gallo, M. L. et al. (2000) Eur. J. Immunol. 30:534-540.

[0350] According to another embodiment, the animal which is immunized with the amyloid β peptide analogue or oligomer may be a mouse with severe combined immunodeficiency (SCID), which has been reconstituted with human peripheral mononuclear blood cells or lymphoid cells or precursors thereof. Such mice which are referred to as chimeric hu-PBMC SCID mice produce human immunoglobulin responses upon antigenic stimulation, as has been proved. For a further description of these mice and of their use for generating antibodies, see, for example, Leader, K. A. et al. (1992) Immunology 76:229-234; Bombil, F. et al. (1996) Immunobiol. 195:360-375; Murphy, W. J. et al. (1996) Semin. Immunol. 8:233-241; Herz, U. et al. (1997) Int. Arch. Allergy Immunol. 113:150-152; Albert, S. E. et al. (1997) J. Immunol. 159:1393-1403; Nguyen, H. et al. (1997) Microbiol. Immunol. 41:901-907; Arai, K. et al. (1998) J. Immunol. Methods 217:79-85; Yoshinari, K. and Arai, K. (1998) Hybridoma 17:41-45; Hutchins, W. A. et al. (1999) Hybridoma 18:121-129; Murphy, W. J. et al. (1999) Clin. Immunol. 90:22-27; Smithson, S. L. et al. (1999) Mol. Immunol. 36:113-124; Chamat, S. et al. (1999) J. Infect. Diseases 180:268-277; and Heard, C. et al. (1999) Molec. Med. 5:35-45.

[0351] According to another embodiment, the animal which is immunized with the amyloid β peptide analogue or oligomer is a mouse which has been treated with a lethal dose of total body irradiation, then protected from radiation with bone marrow cells from mice with severe combined immunodeficiency (SCID) and subsequently transplanted with functional human lymphocytes. This type of chimera, referred to as the Trimera system, is used in order to produce human monoclonal antibodies by immunizing said mice with the antigen of interest and then producing monoclonal antibodies by using standardized hybridoma technology. For a further description of these mice and of their use for generating antibodies, see, for example, Eren, R. et al. (1998) Immunology 93:154-161; Reisner, Y. and Dagan, S. (1998) Trends Biotechnol. 16:242-246; Ilan, E. et al. (1999) Hepatology 29:553-562; and Bocher, W. O. et al. (1999) Immunology 96:634-641.

[0352] Starting from the in-vivo generated antibody-producing cells, monoclonal antibodies may be produced by means of standardized techniques such as the hybridoma technique originally described by Kohler and Milstein (1975, Nature 256:495-497) (see also Brown et al. (1981) J. Immunol. 127:539-46; Brown et al. (1980) J Biol Chem 255:4980-83; Yeh et al. (1976) PNAS 76:2927-31; and Yeh et al. (1982) Int. J. Cancer 29:269-75). The technology of producing monoclonal antibody hybridomas is sufficiently known (see generally R. H. Kenneth, in Monoclonal Antibodies: A New Dimension In Biological Analyses, Plenum Publishing Corp., New York, N.Y. (1980); E. A. Lerner (1981) Yale J. Biol. Med., 54:387-402; M. L. Gefter et al. (1977) Somatic Cell Genet., 3:231-36). Briefly, an immortalized cell line (typically a myeloma) is fused with lymphocytes (typically splenocytes or lymph node cells or peripheral blood lymphocytes) of a mammal immunized with the amyloid β peptide analogue or oligomer of the invention, and the culture supernatants of the resulting hybridoma cells are screened in order to identify a hybridoma which produces a monoclonal antibody of the present invention. Any of the many well known protocols for fusing lymphocytes and immortalized cell lines can be applied for this purpose (see also G. Galfre et al. (1977) Nature 266:550-52; Gefter et al. Somatic Cell Genet., cited supra; Lerner, Yale J. Biol. Med., cited supra; Kenneth, Monoclonal Antibodies, cited supra). Moreover, the skilled worker will appreciate that there are diverse variations of such methods, which are likewise useful. Typically, the immortalized cell line (e.g. a myeloma cell line) is derived from the same mammalian species as the lymphocytes. For example, murine hybridomas may be established by fusing lymphocytes from a mouse immunized with an immunogenic preparation of the invention with an immortalized mouse cell line. Preferred immortalized cell lines are mouse myeloma cell lines which are sensitive to culture medium containing hypoxanthine, aminopterin and thymidine (HAT medium). Any of a number of myeloma cell lines may be used by default as fusion partner, for example the P3-NS1/1-Ag4-1, P3-X63-Ag8.653 or Sp2/O—Ag14 myeloma lines. These myeloma cell lines are available from the American Type Culture Collection (ATCC), Rockville, Md. Typically, HAT-sensitive mouse myeloma cells are fused to mouse splenocytes using polyethylene glycol (PEG). Hybridoma cells resulting from the fusion are then selected using HAT medium, thereby killing unfused and unproductively fused myeloma cells (unfused splenocytes die after several days because they are not transformed). Hybridoma cells producing monoclonal antibodies of the invention are identified by screening the hybridoma culture supernatants for such antibodies, for example by using a dot blot assay in order to select those antibodies which have the binding affinities as defined herein.

[0353] Likewise, said hybridoma can be used as a source of nucleic acid encoding light and/or heavy chains in order to recombinantly produce antibodies of the present invention, as is described below in further detail.

### In-Vitro Approaches

[0354] As an alternative to producing antibodies of the invention by immunization and selection, antibodies of the invention may be identified and isolated by screening recombinant combinatorial immunoglobulin libraries with the amyloid β peptide analogue or oligomer to thereby isolate immunoglobulin library members which have the required binding affinity. Kits for generating and screening display libraries are commercially available (e.g. the Pharmacia Recombinant Phage Antibody System, catalog No. 27-9400-01; and the Stratagene SurfZAP® Phage Display Kit, catalog No. 240612). In many embodiments, the display library is an scFv library or an Fab library. The phage display technique for screening recombinant antibody libraries has been adequately described. Examples of methods and compounds which can be used particularly advantageously for generating and screening antibody display libraries can be found, for example, in McCafferty et al. WO 92/01047, U.S. Pat. No. 5,969,108 and EP 589 877 (describes in particular scFv display), Ladner et al. U.S. Pat. No. 5,223,409, U.S. Pat. No. 5,403,484, U.S. Pat. No. 5,571,698, U.S. Pat. No. 5,837,500 and EP 436 597 (describes pill fusion, for example); Dower et al. WO 91/17271, U.S. Pat. No. 5,427,908, U.S. Pat. No. 5,580,717 and EP 527 839 (describes in particular Fab display); Winter et al. International Publication WO 92/20791 and EP 368,684 (describes in particular the cloning of sequences for variable immunoglobulin domains); Griffiths et al. U.S. Pat. No. 5,885,793 and EP 589 877 (describes in particular isolation of human antibodies to human antigens by using recombinant libraries); Garrard et al. WO 92/09690 (describes in particular phage expression techniques); Knappik et al. WO 97/08320 (describes the human recombinant antibody library HuCal); Salfeld et al. WO 97/29131, (describes production of a recombinant human antibody to a human antigen (human tumor necrosis factor alpha) and also in-vitro affinity maturation of the recombinant antibody) and Salfeld et al. U.S. Provisional Application No. 60/126,603 and the patent applications based hereupon (likewise describes production of recombinant human antibodies to human antigen (human interleukin-12), and also in-vitro affinity maturation of the recombinant antibody).

[0355] Further descriptions of screenings of recombinant antibody libraries can be found in scientific publications such as Fuchs et al. (1991) Bio/Technology 9:1370-1372; Hay et al. (1992) Hum Antibod Hybridomas 3:81-85; Huse et al. (1989) Science 246:1275-1281; Griffiths et al. (1993) EMBO J. 12:725-734; Hawkins et al. (1992) J Mol Biol 226:889-896; Clarkson et al. (1991) Nature 352:624-628; Gram et al. (1992) PNAS 89:3576-3580; Garrard et al. (1991) Bio/Technology 9:1373-1377; Hoogenboom et al. (1991) Nuc Acid Res 19:4133-4137; Barbas et al. (1991) PNAS 88:7978-7982; McCafferty et al. Nature (1990) 348:552-554; and Knappik et al. (2000) J. Mol. Biol. 296:57-86.

[0356] As an alternative to using bacteriophage display systems, recombinant antibody libraries may be expressed on the surface of yeast cells or of bacterial cells. WO 99/36569 describes methods of preparing and screening libraries expressed on the surface of yeast cells. WO 98/49286 describes in more detail methods of preparing and screening libraries expressed on the surface of bacterial cells.

[0357] In all in vitro approaches, a selection process for enriching recombinant antibodies with the desired properties form an integral part of the process, which is generally referred to as “panning” and often takes the form of affinity chromatography over columns to whose matrix the target structure has been attached. Promising candidate molecules are then subjected to individual determination of their absolute and/or relative affinities, preferably by means of a standardized dot blot assay, as described above.

[0358] As may be appreciated by skilled workers, such in vitro methods for selection and enrichment may also be applied towards obtaining non-immunoglobulin related antigen-binding moieties.

[0359] Once an antibody of interest of a combinatorial library has been identified and sufficiently characterized, the DNA sequences encoding the light and heavy chains of said antibody are isolated by means of standardized molecular-biological techniques, for example by means of PCR amplification of DNA from the display package (e.g. the phage) which has been isolated during library screening. Nucleotide sequences of genes for light and heavy antibody chains, which may be used for preparing PCR primers, are known to the skilled worker. A multiplicity of such sequences are described, for example, in Kabat, E. A., et al. (1991) Sequences of Proteins of Immunological Interest, Fifth Edition, U.S. Department of Health and Human Services, NIH Publication No. 91-3242 and in the database of sequences of the human germ line VBASE.

[0360] An antibody or antibody-binding moiety of the invention may be produced by recombinantly expressing the genes for light and heavy immunoglobulin chains in a host cell. In order to recombinantly express an antibody, a host cell is transfected with one or more recombinant expression vectors carrying DNA fragments encoding the light and heavy immunoglobulin chains of said antibody, thereby expressing the light and heavy chains in the host cell and secreting them preferably into the medium in which said host cells are cultured. The antibodies can be isolated from this medium. Standardized recombinant DNA methods are used in order to obtain genes for heavy and light antibody chains, to insert said genes into recombinant expression vectors and to introduce said vectors into host cells. Methods of this kind are described, for example, in Sambrook, Fritsch and Maniatis (eds.), Molecular Cloning; A Laboratory Manual, Second Edition, Cold Spring Harbor, N.Y., (1989), Ausubel, F. M. et al. (eds.) Current Protocols in Molecular Biology, Greene Publishing Associates, (1989) and in U.S. Pat. No. 4,816,397 by Boss et al.

[0361] Once DNA fragments encoding VH and VL segments of the antibody of interest have been obtained, said DNA fragments may be further manipulated using standardized recombinant DNA techniques, for example in order to convert the genes for variable regions to genes for full length antibody chains, to genes for Fab fragments or to an scFv gene. These manipulations comprise linking a VL- or VH-encoding DNA fragment operatively to another DNA fragment encoding another protein, for example a constant antibody region or a flexible linker. The term “operatively linked” is to be understood here as meaning that the two DNA fragments are linked in such a way that the amino acid sequences encoded by said two DNA fragments remain in frame.

[0362] The isolated DNA encoding the VH region may be converted to a gene for a full length heavy chain by operatively linking the VH-region encoding DNA with another DNA molecule encoding heavy chain constant regions (CH1, CH2 and CH3). The sequences of human heavy chain constant region genes are well known (see, for example, Kabat, E. A., et al. (1991) Sequences of Proteins of Immunological Interest, Fifth Edition, U.S. Department of Health and Human Services, NIH Publication No. 91-3242), and DNA fragments spanning said regions may be obtained by means of standardized PCR amplification. The heavy chain constant region may be a constant region from IgG1, IgG2, IgG3, IgG4, IgM, IgA, IgE or IgD, with preference being given to a constant region from IgG, in particular IgG1 or IgG4. To obtain a gene for a heavy chain Fab fragment, the VH-encoding DNA may be operatively linked to another DNA molecule encoding merely the heavy chain constant region CH1.

[0363] The isolated DNA encoding the VL region may be converted to a gene for a full length light chain (and a gene for an Fab light chain) by operatively linking the VL-encoding DNA to another DNA molecule encoding the light chain constant region CL. The sequences of genes of the constant region of human light chain are well known (see Kabat, E. A., et al. (1991) Sequences of Proteins of Immunological Interest, Fifth Edition, U.S. Department of Health and Human Services, NIH Publication No. 91-3242), and DNA fragments spanning said regions may be obtained by means of standardized PCR amplification. The light chain constant region may be a constant kappa or lambda region, a constant kappa region being preferred.

[0364] In order to generate an scFv gene, the VH- and VL-encoding DNA fragments may be operatively linked to another fragment encoding a flexible linker, for example the amino acid sequence (Gly₄-Ser)₃ so that the VH and VL sequences are expressed as a continuous single-chain protein, with the VL and VH regions being linked to one another via said flexible linker (see Bird et al. (1988) Science 242:423-426; Huston et al. (1988) Proc. Natl. Acad. Sci. USA 85:5879-5883; McCafferty et al., Nature (1990) 348:552-554).

[0365] Single domain VH and VL having the binding affinities as described above may be isolated from single domain libraries by the above-described methods. Two VH single-domain chains (with or without CH1) or two VL chains or a pair of one VH chain and one VL chain with the desired binding affinity may be useful as described herein for the antibodies of the invention.

[0366] In order to express the recombinant antibodies or antibody moieties of the invention, the DNAs encoding partial or full length light and heavy chains may be inserted into expression vectors so as to operatively link the genes to appropriate transcriptional and translational control sequences. In this context, the term “operatively linked” is to be understood as meaning that an antibody gene is ligated in a vector in such a way that transcriptional and translational control sequences within the vector fulfill their intended function of regulating transcription and translation of said antibody gene.

[0367] Expediently, the expression vector and the expression control sequences are chosen so as to be compatible with the expression host cell used. The gene for the antibody light chain and the gene for the antibody heavy chain may be inserted into separate vectors or both genes are inserted into the same expression vector, this being the usual case. The antibody genes are inserted into the expression vector by means of standardized methods (for example by ligation of complementary restriction cleavage sites on the antibody gene fragment and the vector, or by ligation of blunt ends, if no restriction cleavage sites are present). The expression vector may already carry sequences for antibody constant regions prior to insertion of the sequences for the light and heavy chains. For example, one approach is to convert the VH and VL sequences to full length antibody genes by inserting them into expression vectors already encoding the heavy and, respectively, light chain constant regions, thereby operatively linking the VH segment to the CH segment(s) within the vector and also operatively linking the VL segment to the CL segment within the vector.

[0368] Additionally or alternatively, the recombinant expression vector may encode a signal peptide which facilitates secretion of the antibody chain from the host cell. The gene for said antibody chain may be cloned into the vector, thereby linking the signal peptide in frame to the N terminus of the gene for the antibody chain. The signal peptide may be an immunoglobulin signal peptide or a heterologous signal peptide (i.e. a signal peptide from a non-immunoglobulin protein). In addition to the genes for the antibody chain, the expression vectors of the invention may have regulatory sequences controlling expression of the genes for the antibody chain in a host cell.

[0369] The term “regulatory sequence” is intended to include promoters, enhancers and further expression control elements (e.g. polyadenylation signals) which control transcription or translation of the genes for the antibody chain. Regulatory sequences of this kind are described, for example, in Goeddel; Gene Expression Technology: Methods in Enzymology 185, Academic Press, San Diego, Calif. (1990). The skilled worker will appreciate that the expression vector design which includes selection of regulatory sequences may depend on factors such as the choice of the host cell to be transformed, the desired strength of expression of the protein, etc. Preferred regulatory sequences for expression in mammalian host cells include viral elements resulting in strong and constitutive protein expression in mammalian cells, such as promoters and/or enhancers derived from cytomegalovirus (CMV) (such as the CMV promoter/enhancer), simian virus 40 (SV40) (such as the SV40 promoter/enhancer), adenovirus (e.g. the adenovirus major late promoter (AdMLP)) and polyoma. For a further description of viral regulatory elements and sequences thereof, see, for example, U.S. Pat. No. 5,168,062 to Stinski, U.S. Pat. No. 4,510,245 to Bell et al. and U.S. Pat. No. 4,968,615 to Schaffner et al.

[0370] Apart from the genes for the antibody chain and the regulatory sequences, the recombinant expression vectors of the invention may have additional sequences such as those which regulate replication of the vector in host cells (e.g. origins of replication) and selectable marker genes. The selectable marker genes facilitate the selection of host cells into which the vector has been introduced (see, for example, U.S. Pat. Nos. 4,399,216, 4,634,665 and 5,179,017, all to Axel et al.). For example, it is common for the selectable marker gene to render a host cell into which the vector has been inserted resistant to cytotoxic drugs such as G418, hygromycin or methotrexate. Preferred selectable marker genes include the gene for dihydrofolate reductase (DHFR) (for use in dhfr⁻ host cells with methotrexate selection/amplification) and the neo gene (for G418 selection).

[0371] For expression of the light and heavy chains, the expression vector(s) encoding said heavy and light chains is(are) transfected into a host cell by means of standardized techniques. The various forms of the term “transfection” are intended to comprise a multiplicity of techniques customarily used for introducing exogenous DNA into a prokaryotic or eukaryotic host cell, for example electroporation, calcium phosphate precipitation, DEAE-dextran transfection, and the like. Although it is theoretically possible to express the antibodies of the invention either in prokaryotic or eukaryotic host cells, preference is given to expressing the antibodies in eukaryotic cells and, in particular, in mammalian host cells, since the probability of a correctly folded and immunologically active antibody being assembled and secreted is higher in such eukaryotic cells and in particular mammalian cells than in prokaryotic cells. Prokaryotic expression of antibody genes has been reported as being ineffective for production of high yields of active antibody (Boss, M. A. and Wood, C. R. (1985) Immunology Today 6:12-13).

[0372] Preferred mammalian host cells for expressing recombinant antibodies of the invention include CHO cells (including dhfr⁻ CHO cells described in Urlaub and Chasin, (1980) Proc. Natl. Acad. Sci. USA 77:4216-4220, which are used together with a DHFR-selectable marker, as described, for example, in R. J. Kaufman and P. A. Sharp (1982) Mol. Biol. 159:601-621), NS0 myeloma cells, COS cells and SP2 cells. When introducing recombinant expression vectors encoding the antibody genes into mammalian host cells, the antibodies are produced by culturing the host cells until the antibody is expressed in said host cells or, preferably, the antibody is secreted into the culture medium in which the host cells grow. The antibodies may then be isolated from the culture medium by using standardized protein purification methods.

[0373] It is likewise possible to use host cells in order to produce moieties of intact antibodies, such as Fab fragments or scFv molecules. Variations of the above-described procedure are of course included in the invention. For example, it may be desirable to transfect a host cell with DNA encoding either the light chain or the heavy chain (but not both) of an antibody of the invention. If either light or heavy chains are present which are not required for binding of the antigen of interest, then the DNA encoding either such a light or such a heavy chain or both may be removed partially or completely by means of recombinant DNA technology. Molecules expressed by such truncated DNA molecules are likewise included in the antibodies of the invention. In addition, it is possible to produce bifunctional antibodies in which a heavy chain and a light chain are an antibody of the invention and the other heavy chain and the other light chain have specificity for an antigen different from the antigen of interest, by crosslinking an antibody of the invention to a second antibody by means of standardized chemical methods.

[0374] In a preferred system for recombinant expression of an antibody of the invention or an antigen-binding moiety thereof, a recombinant expression vector encoding both the antibody heavy chain and the antibody light chain is introduced into dhfr⁻ CHO cells by means of calcium phosphate-mediated transfection. Within the recombinant expression vector, the genes for the heavy and light antibody chains are in each case operatively linked to regulatory CMV enhancer/AdMLP-promoter elements in order to effect strong transcription of said genes. The recombinant expression vector also carries a DHFR gene which can be used for selecting dhfr⁻ CHO cells transfected with the vector by using methotrexate selection/amplification. The selected transformed host cells are cultured so that the heavy and light antibody chains are expressed, and intact antibody is isolated from the culture medium. Standardized molecular-biological techniques are used in order to prepare the recombinant expression vector, to transfect the host cells, to select the transformants, to culture said host cells, and to obtain the antibody from the culture medium. Thus the invention also provides a method of synthesizing a recombinant antibody of the invention by culturing a host cell of the invention in a suitable culture medium until a recombinant antibody of the invention has been synthesized. The method may furthermore comprise isolating said recombinant antibody from said culture medium.

[0375] As an alternative to screening recombinant antibody libraries by phage display, other methods known to the skilled worker may be used for screening large combinatorial libraries to identify the antibodies of the invention. Basically, any expression system in which a close physical linkage between a nucleic acid and the antibody encoded thereby is established and may be used to select a suitable nucleic acid sequence by virtue of the properties of the antibody it encodes may be employed.

[0376] In one type of an alternative expression system, the recombinant antibody library is expressed in the form of RNA-protein fusions, as described in WO 98/31700 to Szostak and Roberts, and in Roberts, R. W. and Szostak, J. W. (1997) Proc. Natl. Acad. Sci. USA 94:12297-12302. In this system, in-vitro translation of synthetic mRNAs carrying on their 3′ end puromycin, a peptidyl acceptor antibiotic, generates a covalent fusion of an mRNA and the peptide or protein encoded by it. Thus a specific mRNA of a complex mixture of mRNAs (e.g. a combinatorial library) may be concentrated on the basis of the properties of the encoded peptide or protein (e.g. of the antibody or a moiety thereof), such as binding of said antibody or said moiety thereof to the amyloid β peptide analogue or oligomer. Nucleic acid sequences which encode antibodies or moieties thereof and which are obtained by screening of such libraries may be expressed by recombinant means in the above-described manner (e.g. in mammalian host cells) and may, in addition, be subjected to further affinity maturation by either screening in further rounds mRNA-peptide fusions, introducing mutations into the originally selected sequence(s), or using other methods of in-vitro affinity maturation of recombinant antibodies in the above-described manner.

### Combinations of In-Vivo and In-Vitro Approaches

[0377] The antibodies of the invention may likewise be produced by using a combination of in-vivo and in-vitro approaches such as methods in which the amyloid β peptide analogue or oligomer is first allowed to act on an antibody repertoire in a host animal in vivo to stimulate production of amyloid β peptide analogue- or oligomer-binding antibodies and then further antibody selection and/or antibody maturation (i.e. optimization) are accomplished with the aid of one or more in-vitro techniques. According to one embodiment, a combined method of this kind may comprise firstly immunizing a nonhuman animal (e.g. a mouse, rat, rabbit, chicken, camelid, sheep or goat or a transgenic version thereof or a chimeric mouse) with said oligomer or derivative to stimulate an antibody response to the antigen and then preparing and screening a phage display antibody library by using immunoglobulin sequences of lymphocytes which have been stimulated in vivo by the action of said oligomer or derivative. The first step of this combined procedure may be carried out in the manner described above in connection with the in-vivo approaches, while the second step of this procedure may be carried out in the manner described above in connection with the in-vitro approaches. Preferred methods of hyperimmunizing nonhuman animals with subsequent in-vitro screening of phage display libraries prepared from said stimulated lymphocytes include those described by BioSite Inc., see, for example, WO 98/47343, WO 91/17271, U.S. Pat. No. 5,427,908 and U.S. Pat. No. 5,580,717.

[0378] According to another embodiment, a combined method comprises firstly immunizing a non-human animal (e.g. a mouse, rat, rabbit, chicken, camelid, sheep, goat or a knockout and/or transgenic version thereof, or a chimeric mouse) with an amyloid β peptide analogue or oligomer of the invention to stimulate an antibody response to said amyloid β peptide analogue or oligomer and selecting the lymphocytes which produce the antibodies having the desired specificity by screening hybridomas (prepared, for example, from the immunized animals). The genes for the antibodies or single domain antibodies are isolated from the selected clones (by means of standardized cloning methods such as reverse transcriptase polymerase chain reaction) and subjected to in-vitro affinity maturation in order to improve thereby the binding properties of the selected antibody or the selected antibodies. The first step of this procedure may be conducted in the manner described above in connection with the in-vivo approaches, while the second step of this procedure may be conducted in the manner described above in connection with the in-vitro approaches, in particular by using methods of in-vitro affinity maturation, such as those described in WO 97/29131 and WO 00/56772.

[0379] In a further combined method, the recombinant antibodies are generated from individual isolated lymphocytes by using a procedure which is known to the skilled worker as selected lymphocyte antibody methods (SLAM) and which is described in U.S. Pat. No. 5,627,052, WO 92/02551 and Babcock, J. S. et al. (1996) Proc. Natl. Acad. Sci. USA 93:7843-7848. In this method, a nonhuman animal (e.g. a mouse, rat, rabbit, chicken, camelid, sheep, goat, or a transgenic version thereof, or a chimeric mouse) is firstly immunized in vivo with the amyloid β peptide analogue or oligomer to stimulate an immune response to said amyloid β peptide analogue or oligomer, and then individual cells secreting antibodies of interest are selected by using an antigen-specific haemolytic plaque assay. To this end, the globulomer or derivative thereof or structurally related molecules of interest may be coupled to sheep erythrocytes, using a linker such as biotin, thereby making it possible to identify individual cells secreting antibodies with suitable specificity by using the haemolytic plaque assay. Following the identification of cells secreting antibodies of interest, cDNAs for the variable regions of the light and heavy chains are obtained from the cells by reverse transcriptase PCR, and said variable regions may then be expressed in association with suitable immunoglobulin constant regions (e.g. human constant regions) in mammalian host cells such as COS or CHO cells. The host cells transfected with the amplified immunoglobulin sequences derived from in vivo-selected lymphocytes may then be subjected to further in-vitro analysis and in-vitro selection by spreading out the transfected cells, for example, in order to isolate cells expressing antibodies with the binding affinity. The amplified immunoglobulin sequences may furthermore be manipulated in vitro.

[0380] Antibodies having the required affinities defined herein can be selected by performing a dot blot essentially as described above. Briefly, the antigen is attached to a solid matrix, preferably dotted onto a nitrocellulose membrane, in serial dilutions. The immobilized antigen is then contacted with the antibody of interest followed by detection of the latter by means of an enzyme-conjugated secondary antibody and a colorimetric reaction; at defined antibody and antigen concentrations, the amount of antibody bound allows affinity determination. Thus the relative affinity of two different antibodies to one target, or of one antibody to two different targets, is here defined as the relation of the respective amounts of target-bound antibody observed with the two antibody-target combinations under otherwise identical dot blot conditions.

[0381] Antibody moieties such as Fab and F(ab′)₂ fragments may be produced from whole antibodies by using conventional techniques such as digestion with papain or pepsin. In addition, antibodies, antibody moieties and immunoadhesion molecules may be obtained by using standardized recombinant DNA techniques.

[0382] In a further aspect, the invention also relates to the use of the amyloid β peptide analogue or oligomer of the invention for providing an aptamer that binds to the amyloid β peptide analogue or oligomer (hereinafter also referred to as anti-amyloid β peptide analogue or anti-oligomer aptamer). Accordingly, the invention relates also to a method for providing an aptamer having specificity for the amyloid β peptide analogue or oligomer as defined herein, which method comprises at least the steps of

a) providing a binding target comprising the amyloid β peptide analogue or oligomer;
b) exposing an aptamer repertoire or potential aptamer repertoire to said binding target; and
c) selecting from said repertoire an aptamer which specifically binds to said amyloid β peptide analogue or oligomer.

[0383] An “aptamer” herein refers to oligonucleic acid or peptide molecules that are capable of specific, non-covalent binding to its target. Aptamer preferably comprise peptide, DNA or RNA sequence, more preferably peptide, DNA or RNA sequence of about 3 to 100 monomers, which may at one end or both ends be attached to a larger molecule, preferably a larger molecule mediating biochemical functions, more preferably a larger molecule inducing inactivation and/or degradation, most preferably ubiquitin, or preferably a larger molecule facilitating destruction, more preferably an enzyme or a fluorescent protein.

[0384] Here it is to be understood that a “potential aptamer repertoire” refers to any library, collection, assembly or set of amino acid sequences or nucleic acid sequences or to any generator of such a library, collection, assembly or set of amino acid sequences that can be used for producing an aptamer repertoire in vivo or in vitro.

[0385] In another aspect, the invention also provides aptamers that bind to the amyloid β peptide analogue or oligomer as defined herein.

[0386] In a preferred embodiment of the invention, the aptamer is obtainable by a method comprising selecting the aptamer from a repertoire or potential repertoire as described herein.

[0387] According to a particularly preferred embodiment, the present invention provides amyloid β peptide analogue- or oligomer-specific aptamers. These include in particular aptamers having a comparatively smaller affinity for both the monomeric and fibrillomeric forms of Aβ peptide than for the amyloid β peptide analogue or oligomer of the invention.

[0388] The agents that are capable of binding to the amyloid β peptide analogue or oligomer of the invention also have many potential applications, some of which are described in the following. They are especially useful for therapeutic and diagnostic purposes.

[0389] Antibodies that specifically bind to the globulomer epitope have proven to be useful agents in therapeuitc and disgnostic applications. As the amyloid β peptide analogues or oligomers of the present invention react with said antibodies the amyloid β peptide analogues or oligomers are believed to display the same or a very similar epitop.

[0390] Thus, the invention also provides agents that are capable of binding to the amyloid β peptide analogue or oligomer of the invention for therapeutic uses.

[0391] In one aspect, the invention also provides therapeutic compositions comprising an agent that is capable of binding to the amyloid β peptide analogue or oligomer of the invention. According to a particular embodiment, said compositions are pharmaceutical compositions which further comprise a pharmaceutical acceptable carrier.

[0392] Said pharmaceutical compositions of the invention may furthermore contain at least one additional therapeutic agent, for example one or more additional therapeutic agents for the treatment of a disease for whose relief the agents of the invention are useful. If, for example, the agent of the invention binds to an amyloid β peptide analogue or oligomer of the invention, the pharmaceutical composition may furthermore contain one or more additional therepeutic agents useful for the treatment of disorders in which the activity of said amyloid β peptide analogue or oligomer is important.

[0393] Pharmaceutically suitable carriers include any solvents, dispersing media, coatings, antibacterial and antifungal agents, isotonic and absorption-delaying agents, and the like, as long as they are physiologically compatible. Pharmaceutically acceptable carriers include, for example, water, saline, phosphate-buffered saline, dextrose, glycerol, ethanol and the like, and combinations thereof. In many cases, preference is given to using isotonic agents, for example sugars, polyalcohols such as mannitol or sorbitol, or sodium chloride in addition. Pharmaceutically suitable carriers may furthermore contain relatively small amounts of auxiliary substances such as wetting agents or emulsifiers, preservatives or buffers, which increase the half life or efficacy of the antibodies.

[0394] The pharmaceutical compositions may be suitable for parenteral administration, for example. Here, the agents are prepared preferably as injectable solutions with an agent, e.g. antibody, content of 0.1-250 mg/ml. The injectable solutions may be prepared in liquid or lyophilized form, the dosage form being a flint glass or vial, an ampoule or a filled syringe. The buffer may contain L-histidine (1-50 mM, preferably 5-10 mM) and have a pH of 5.0-7.0, preferably of 6.0. Further suitable buffers include, without being limited thereto, sodium succinate, sodium citrate, sodium phosphate or potassium phosphate buffers. Sodium chloride may be used in order to adjust the tonicity of the solution to a concentration of 0-300 mM (preferably 150 mM for a liquid dosage form). Cryoprotectants, for example sucrose (e.g. 0-10%, preferably 0.5-1.0%) may also be included for a lyophilized dosage form. Other suitable cryoprotectants are trehalose and lactose. Fillers, for example mannitol (e.g. 1-10%, preferably 2-4%) may also be included for a lyophilized dosage form. Stabilizers, for example L-methionine (e.g. 51-50 mM, preferably 5-10 mM) may be used both in liquid and lyophilized dosage forms. Further suitable fillers are glycine and arginine. Surfactants, for example polysorbate 80 (e.g. 0-0.05%, preferably 0.005-0.01%), may also be used. Further surfactants are polysorbate 20 and BRIJ surfactants.

[0395] The compositions of the invention may have a multiplicity of forms. These include liquid, semisolid and solid dosage forms, such as liquid solutions (e.g. injectable and infusible solutions), dispersions or suspensions, tablets, pills, powders, liposomes and suppositories. The preferred form depends on the intended type of administration and on the therapeutic application. Typically, preference is given to compositions in the form of injectable or infusible solutions, for example compositions which are similar to antibodies for passive immunization of humans. The preferred route of administration is parenteral (e.g. intravenous, subcutaneous, intraperitoneal or intramuscular). According to a preferred embodiment, the agent is administered by intravenous infusion or injection. According to another preferred embodiment, the agent is administered by intramuscular or subcutaneous injection.

[0396] Therapeutic compositions must typically be sterile and stable under preparation and storage conditions. The compositions may be formulated as solutions, microemulsions, dispersions, liposomes or other ordered structures suitable for high concentrations of active substance. Sterile injectable solutions may be prepared by introducing the active compound (i.e. the agent such as an antibody) in the required amount into a suitable solvent, where appropriate with one or a combination of the abovementioned ingredients, as required, and then sterile-filtering said solution. Dispersions are usually prepared by introducing the active compound into a sterile vehicle containing a basic dispersion medium and, where appropriate, other required ingredients. In the case of a sterile lyophilized powder for preparing sterile injectable solutions, vacuum drying and spray drying are preferred methods of preparation, which produces a powder of the active ingredient and, where appropriate, of further desired ingredients from a previously sterile-filtered solution. The correct flowability of a solution may be maintained by using, for example, a coating such as lecithin, by maintaining, in the case of dispersions the required particle size or by using surfactants. A prolonged absorption of injectable compositions may be achieved by additionally introducing into the composition an agent which delays absorption, for example monostearate salts and gelatine.

[0397] The agents of the invention may be administered by a multiplicity of methods known to the skilled worker, although the preferred type of administration for many therapeutic applications is subcutaneous injection, intravenous injection or infusion. The skilled worker will appreciate that the route and/or type of administration depend on the result desired. According to particular embodiments, the active compound may be prepared with a carrier which protects the compound against rapid release, such as, for example, a formulation with sustained or controlled release, which includes implants, transdermal plasters and microencapsulated release systems. Biologically degradable biocompatible polymers such as ethylene vinyl acetate, polyanhydrides, polyglycolic acid, collagen, polyorthoesters and polylactic acid may be used. The methods of preparing such formulations are well known to the skilled worker; see, for example, Sustained and Controlled Release Drug Delivery Systems, J. R. Robinson, ed., Marcel Dekker, Inc., New York, 1978.

[0398] According to particular embodiments, an agent of the invention may be administered orally, for example in an inert diluent or a metabolizable edible carrier. The agent (and further ingredients, if desired) may also be enclosed in a hard or soft gelatine capsule, compressed to tablets or added directly to food. For oral therapeutic administration, the agents may be mixed with excipients and used in the form of oral tablets, buccal tablets, capsules, elixirs, suspensions, syrups and the like. If it is intended to administer an agent of the invention via a route other than the parenteral one, it may be necessary to choose a coating from a material which prevents its inactivation.

[0399] In a further aspect, the invention provides the use of an agent that is capable of binding to the amyloid β peptide analogue or oligomer of the invention for preparing a pharmaceutical composition for treating or preventing an amyloidosis.

[0400] In a preferred embodiment of the invention, the pharmaceutical composition is for passive immunization.

[0401] Accordingly, the invention also provides a method of treating or preventing an amyloidosis in a subject in need thereof, which comprises administering the agent that is capable of binding to the amyloid β peptide analogue or oligomer of the invention to the subject.

[0402] In a preferred embodiment of the invention, administering the agent that is capable of binding to the Aβ(amyloid β peptide analogue or oligomer of the invention is for passively immunizing the subject against an amyloidosis.

[0403] The screening of biological samples revealed that such samples may contain substances that react with agents that are capable of binding to the amyloid β peptide analogue or oligomer such as anti-amyloid β peptide analogue or anti-oligomer antibodies of the invention. Such substances which have a certain binding affinity to said agents but which cannot be said to correspond to the amyloid β peptide analogues or oligomers of the invention, are hereinafter referred to as antigens comprising the amyloid β peptide analogue or oligomer epitope.

[0404] Thus, the agents that are capable of binding to the amyloid β peptide analogue or oligomer of the invention are also capable of detecting, both in vitro and in vivo, antigens comprising amyloid β peptide analogue or oligomer epitopes to which they bind. Said agents may therefore be used for detecting said antigens, for instance a sample that is derived from a subject suspect of having an amyloidosis, or in a subject suspect of having an amyloidosis, for instance a human individual or other mammal.

[0405] The invention thus also provides agents that are capable of binding to the amyloid β peptide analogue or oligomer of the invention for diagnostic uses.

[0406] In one aspect, the invention provides diagnostic compositions comprising an agent that is capable of binding to the amyloid β peptide analogue or oligomer of the invention. According to a particular embodiment, said compositions are pharmaceutical compositions which further comprise a pharmaceutical acceptable carrier.

[0407] In a further aspect, the invention provides the use of an agent that is capable of binding to the amyloid β peptide analogue or oligomer of the invention for preparing a composition for diagnosing an amyloidosis.

[0408] Accordingly, the invention also provides a method of diagnosing an amyloidosis which comprises providing a sample from the subject suspected of having the amyloidosis, contacting the sample with an agent that is capable of binding to the amyloid β peptide analogue or oligomer of the invention for a time and under conditions sufficient for the formation of a complex comprising the agent that is capable of binding to the amyloid β peptide analogue or oligomer of the invention and an antigen comprising the amyloid β peptide analogue or oligomer epitope, the presence of the complex indicating the subject has the amyloidosis. According to a particular embodiment, at least the step of contacting the sample is carried out ex vivo and in particular in vitro.

[0409] Thus, the agents that are capable of binding to the amyloid β peptide analogue or oligomer of the invention may be used in a variety of diagnostic methods and assays.

[0410] According to one embodiment, the method of diagnosing an amyloidosis in a patient suspected of having this disease comprises the steps of: 1) isolating a biological sample from the patient; 2) contacting the biological sample with at least one of the agents that are capable of binding to the amyloid β peptide analogue or oligomer of the invention for a time and under conditions sufficient for formation of antigen/agent complexes; and 3) detecting presence of the antigen/agent complexes in said sample, presence of the complexes indicating a diagnosis of an amyloidosis, e.g. Alzheimer's disease, in the patient. The antigen is one comprising the amyloid β peptide analogue or oligomer epitope. According to a particular embodiment, at least one of said steps 2) and 3) is carried out ex vivo and in particular in vitro. According to a further particular embodiment, the method does not comprise step 1).

[0411] According to a further embodiment, the method of diagnosing an amyloidosis in a patient suspected of having this disease comprises the steps of: 1) isolating a biological sample from the patient; 2) contacting the biological sample with an antigen for a time and under conditions sufficient for the formation of antibody/antigen complexes; 3) adding a conjugate to the resulting antibody/antigen complexes for a time and under conditions sufficient to allow the conjugate to bind to the bound antibody, wherein the conjugate comprises one of the agents that are capable of binding to amyloid β peptide analogue or oligomer of the invention, attached to a signal generating compound capable of generating a detectable signal; and 4) detecting the presence of an antibody which may be present in the biological sample, by detecting a signal generated by the signal generating compound, the signal indicating a diagnosis of an amyloidosis, e.g. Alzheimer's disease in the patient. The antigen is one comprising the amyloid β peptide analogue or oligomer epitope. According to a particular embodiment, at least one of said steps 2), 3) and 4) is carried out ex vivo and in particular in vitro. According to a further particular embodiment, the method does not comprise step 1).

[0412] According to a further embodiment, the method of diagnosing an amyloidosis in a patient suspected of having this disease comprises the steps of: 1) isolating a biological sample from said patient; 2) contacting the biological sample with anti-antibody, wherein the anti-antibody is specific for one of the agents that are capable of binding to the amyloid β peptide analogue or oligomer of the invention, for a time and under conditions sufficient to allow for formation of anti-antibody/agent complexes, the complexes containing agent present in the biological sample; 3) adding a conjugate to resulting anti-antibody/agent complexes for a time and under conditions sufficient to allow the conjugate to bind to bound agent, wherein the conjugate comprises an antigen comprising the amyloid β peptide analogue or oligomer epitope, which binds to a signal generating compound capable of generating a detectable signal; and 4) detecting a signal generated by the signal generating compound, the signal indicating a diagnosis of an amyloidosis, e.g. Alzheimer's disease in the patient. According to a particular embodiment, at least one of said steps 2), 3) and 4) is carried out ex vivo and in particular in vitro. According to a further particular embodiment, the method does not comprise step 1).

[0413] In one diagnostic embodiment of the present invention, the agent that is capable of binding to the amyloid β peptide analogue or oligomer of the invention, or a portion thereof, is coated on a solid phase (or is present in a liquid phase). The test or biological sample (e.g., whole blood, cerebrospinal fluid, serum, etc.) is then contacted with the solid phase. If antigen (e.g., globulomer) is present in the sample, such antigens bind to the agents that are capable of binding to the amyloid β peptide analogue or oligomer of the invention on the solid phase and are then detected by either a direct or indirect method. The direct method comprises simply detecting presence of the complex itself and thus presence of the antigens. In the indirect method, a conjugate is added to the bound agent. The conjugate comprises a second antibody, which binds to the bound antigen, attached to a signal-generating compound or label. Should the second antibody bind to the bound antigen, the signal-generating compound generates a measurable signal. Such signal then indicates presence of the antigen in the test sample.

[0414] Examples of solid phases used in diagnostic immunoassays are porous and non-porous materials, latex particles, magnetic particles, microparticles (see U.S. Pat. No. 5,705,330), beads, membranes, microtiter wells and plastic tubes. The choice of solid phase material and method of labeling the antigen or antibody present in the conjugate, if desired, are determined based upon desired assay format performance characteristics.

[0415] As noted above, the conjugate (or indicator reagent) will comprise an antibody (or perhaps anti-antibody, depending upon the assay), attached to a signal-generating compound or label. This signal-generating compound or “label” is itself detectable or may be reacted with one or more additional compounds to generate a detectable product. Examples of signal-generating compounds include chromogens, radioisotopes (e.g., 125I, 131I, 32P, 3H, 35S and 14C), chemiluminescent compounds (e.g., acridinium), particles (visible or fluorescent), nucleic acids, complexing agents, or catalysts such as enzymes (e.g., alkaline phosphatase, acid phosphatase, horseradish peroxidase, beta-galactosidase and ribonuclease). In the case of enzyme use (e.g., alkaline phosphatase or horseradish peroxidase), addition of a chromo-, fluoro-, or lumo-genic substrate results in generation of a detectable signal. Other detection systems such as time-resolved fluorescence, internal-reflection fluorescence, amplification (e.g., polymerase chain reaction) and Raman spectroscopy are also useful.

[0416] Examples of biological fluids which may be tested by the above immunoassays include plasma, whole blood, dried whole blood, serum, cerebrospinal fluid or aqueous or organo-aqueous extracts of tissues and cells.

[0417] Kits are also included within the scope of the present invention. More specifically, the present invention includes kits for determining the presence of antigens comprising the amyloid β peptide analogue or oligomer epitope in a subject. In particular, a kit for determining the presence of said antigens in a sample comprises a) an agent that is capable of binding to the amyloid β peptide analogue or oligomer of the invention; and optionally b) a conjugate comprising an antibody that binds to the agent, attached to a signal generating compound capable of generating a detectable signal. The kit may also contain a control or calibrator which comprises a reagent which binds to the antigen.

[0418] The present invention also includes another type of kit for detecting antibodies such as auto-antibodies in a sample. The kit may comprise a) an antibody specific for the agent that is capable of binding to the amyloid β peptide analogue or oligomer of the invention (e.g. an anti-antibody), and b) an antigen comprising the amyloid β peptide analogue or oligomer epitope as defined herein. A control or calibrator comprising a reagent which binds to the antigen may also be included. More specifically, the kit may comprise a) an anti-antibody specific for the auto-antibody and b) a conjugate comprising antigen comprising the amyloid β peptide analogue or oligomer epitope as defined herein, the conjugate being attached to a signal generating compound capable of generating a detectable signal. Again, the kit may also comprise a control or calibrator comprising a reagent which binds to the antigen.

[0419] The kit may also comprise one container such as vial, bottles or strip, with each container with a pre-set solid phase, and other containers containing the respective conjugates. These kits may also contain vials or containers of other reagents needed for performing the assay, such as washing, processing and indicator reagents.

[0420] Due to their binding affinity to the agents that are capable of binding to the amyloid β peptide analogue or oligomer of the invention, said antigens comprising amyloid β peptide analogue or oligomer epitopes can be detected in preparations suspected of containing such epitopes, their amount can be determined in said preparations and they can be enriched. Accordingly, the present invention also provides a method for detecting, for determining the amount of and/or for enriching amyloid β peptide analogue or oligomer epitopes in preparations suspected or know to comprise such epitopes. Once detected and enriched, said substances may have potential applications similar to those described herein with respect to the amyloid β peptide analogue or oligomer of the invention.

[0421] Moreover, the present invention includes a method of designing agents such as antibodies, non-antibody biological agents or small molecules useful in the treatment or prevention of an amyloidosis in a patient. This method comprises the steps of: a) analyzing the three-dimensional structure of the amyloid β peptide analogue or oligomer described herein; b) identifying one or more epitopes on the surface of the amyloid β peptide analogue or oligomer of step a); and c) designing an agent such as an antibody, non-antibody biological agent or a small molecule which will bind to the identified epitope or epitopes of step b), the antibody, non-antibody biological agent or a small molecule to be used in the treatment or prevention of amyloidosis.

### ADVANTAGES OF THE INVENTION

[0422] The amino acid composition of the amyloid β peptide analogues and oligomers of the present invention are well-defined and reproducible.

[0423] The amyloid β peptide analogues and oligomers of the present invention display a stable conformation.

[0424] The amyloid β peptide analogues and oligomers of the present invention display better hydrodynamic properties.

[0425] Active immunization with the amyloid β peptide analogues or oligomers of the present invention is expected to elicit a highly selective immune response for Aβ globulomers. Because the amyloid β peptide analogues and oligomers of the present invention can easily be designed to lack N-terminal sequences, the risk of eliciting an unspecific N-terminal Aβ peptide directed immune response can be eliminated. The amyloid β peptide analogues and oligomers of the present invention are therefore capable of eliciting an immune response that discriminates other forms of Aβ peptides, particularly monomers and fibrils.

[0426] Further, it is expected that active immunization with the amyloid β peptide analogues or oligomers of the present invention will be effective in reversing cognitive deficits in AD transgenic mouse models as the elicited antibody response is comparable to active immunization with Aβ(20-42) truncated globulomer. The latter has been proven to reverse deficits in novel object recognition task.

[0427] All patents, patent applications and publications referred to herein are hereby incorporated in their entirety by reference.

[0428] Deposit Information: The hybridoma which produces monoclonal antibody 5F7 was deposited with the American Type Culture Collection, 10801 University Boulevard, Manassas, Va. 20110 on Dec. 1, 2005 under the terms of the Budapest Treaty and received designation PTA-7241. Further, the hybridoma which produces monoclonal antibody 10F11 was deposited with the American Type Culture Collection, 10801 University Boulevard, Manassas, Va. 10801 on Dec. 1, 2005 under the terms of the Budapest Treaty and received designation PTA-7239. Additionally, the hybridoma which produces monoclonal antibody 4B7 was deposited with the American Type Culture Collection, 10801 University Boulevard, Manassas, Va. 10801 on Dec. 1, 2005 under the terms of the Budapest Treaty and received designation PTA-7242, and the hybridoma which produces monoclonal antibody 7C6 was deposited with the American Type Culture Collection, 10801 University Boulevard, Manassas, Va. 10801 on Dec. 1, 2005 under the terms of the Budapest Treaty and received designation PTA-7240. Additionally, the hybridoma which produces monoclonal antibody 6A2 was deposited with the American Type Culture Collection, 10801 University Boulevard, Manassas, Va. 10801 on Feb. 28, 2006 under the terms of the Budapest Treaty and received designation PTA-7409, and the hybridoma which produces monoclonal antibody 2F2 was deposited with the American Type Culture Collection, 10801 University Boulevard, Manassas, Va. 10801 on Feb. 28, 2006 under the terms of the Budapest Treaty and received designation PTA-7408. The hybridoma which produces monoclonal antibody 4D10 was deposited with the American Type Culture Collection, 10801 University Boulevard, Manassas, Va. 10801 on Feb. 28, 2006 under the terms of the Budapest Treaty and received designation PTA-7405. The hybridoma which produces monoclonal antibody 7E5 was deposited with the American Type Culture Collection, 10801 University Boulevard, Manassas, Va. 10801 on Aug. 16, 2006 under the terms of the Budapest Treaty and received designation PTA-7809. The hybridoma which produces monoclonal antibody 10C1 was deposited with the American Type Culture Collection, 10801 University Boulevard, Manassas, Va. 10801 on Aug. 16, 2006 under the terms of the Budapest Treaty and received designation PTA-7810. The hybridoma which produces monoclonal antibody 3B10 was deposited with the American Type Culture Collection, 10801 University Boulevard, Manassas, Va. 10801 on Sep. 1, 2006 under the terms of the Budapest Treaty and received designation PTA-7851. All deposits have been made on behalf of Abbott Laboratories, 100 Abbott Park Road, Abbott Park, Ill. 60064 (US).

[0429] All these monoclonal antibodies are murine monoclonal antibodies.

[0430] The following examples are intended to illustrate the invention, without limiting its scope.

### EXAMPLES

### Example 1

### Peptide Synthesis

[0431] All reagents were used as obtained from the vendor unless otherwise specified. Peptide synthesis reagents including diisopropylethylamine (DIEA), N-methylpyrrolidone (NMP), dichloromethane (DCM), (2-(7-Aza-1H-benzotriazole-1-yl)-1,1,3,3-tetramethyluronium hexafluorophosphate) (HATU), 2-(1H-benzotriazole-1-yl)-1,1,3,3-tetramethyl-uronium-hexafluorophosphate (HBTU), 1-hydrobenzotriazole (HOBt), and piperidine were obtained from Applied Biosystems, Inc. (ABI), Foster City, Calif.; or American Bioanalytical, Natick, Mass. Standard 9-Fluorenylmethyloxycarbonyl (Fmoc) amino acid derivatives (Fmoc-Ala-OH, Fmoc-Cys(Trt)-OH, Fmoc-Cys(ACM)-OH, Fmoc-Asp(tBu)-OH, Fmoc-Glu(tBu)-OH, Fmoc-Phe-OH, Fmoc-Gly-OH, Fmoc-His(Trt)-OH, Fmoc-Ile-OH, Fmoc-Lys(Boc)-OH, Fmoc-Leu-OH, Fmoc-Met-OH, Fmoc-Asn(Trt)-OH, Fmoc-Pro-OH, Fmoc-Gln(Trt)-OH, Fmoc-Arg(Pbf)-OH, Fmoc-Ser(tBu)-OH, Fmoc-Thr(tBu)-OH, Fmoc-Val-OH, Fmoc-Trp(Boc)-OH, Fmoc-Tyr(tBu)-OH) were obtained from Anaspec, San Jose, Calif.; or ABI. Fmoc-3-amino-1-carboxymethyl-pyridin-2-one and Fmoc-cis-3-phenyl-pyrrolidine-2-carboxylic acid were obtained from NeoSystem, Strasbourg, France. Peptide synthesis resins (Fmoc-Ala-PEG polystyrene resin, Fmoc-Ala-Wang resin, Rink amide MBHA resin) were obtained from ABI, CS-Bio, Menlo Park, Calif. or Novabiochem, Hohenbrunn, Germany. Trifluoroacetic acid (TFA) was obtained from Oakwood Products, West Columbia, S.C. Thioanisole, phenol, triisopropylsilane (TIS), 3,6-dioxa-1,8-octanedithiol (DODT), potassium ferricyanide, and isopropanol, were obtained from Aldrich Chemical Co., Milwaukee, Wis. Matrix-assisted laser desorption ionization mass-spectra (MALDI-MS) were recorded on an Applied Biosystems Voyager DE-PRO MS). Electrospray mass-spectra (ESI-MS) were recorded on Finnigan SSQ7000 (Finnigan Corp., San Jose, Calif.) in both positive and negative ion mode.

### General Procedure for Solid-Phase Peptide Synthesis:

[0432] Peptides were synthesized with either 100 μmol preloaded resin/vessel on an ABI Pioneer peptide synthesizer using standard 0.1 mM coupling cycles, or 250 μmol resin/vessel on an ABI 433 peptide synthesizer. On the ABI Pioneer synthesizer coupling standard Fmoc-amino acids, preloaded tubes containing 0.4 mmol reagent were used with single-coupling with 4:4:8 Fmoc-amino acid:HATU:DIEA. On the ABI 433 synthesizer, preloaded cartridges containing 1 mM Fmoc-amino acid was used with single-coupling preactivated as a 4:4:4:8 Fmoc-amino acid:HBTU:HOBt:DIEA. On each synthesizer following coupling the Fmoc protecting group was removed by treatment with piperidine. When the synthesis was complete, the resin was washed with 3×DCM and 3× isopropanol, and dried in vacuo to give the protected peptide resin.

### General Procedure for Cleavage and Deprotection of Resin-Bound Peptide:

[0433] The peptides were cleaved from the resin by shaking the resin for 3 h at ambient temperature in a cleavage cocktail consisting of 80% TFA, 5% water, 5% thioanisole, 5% phenol, 2.5% TIS, and 2.5% DODT (1 mL/0.1 g resin). The resin was removed by filtration, rinsed with 2×TFA, the TFA evaporated from the filtrates, the residue precipitated with ether (10 mL/0.1 g resin), recovered by centrifugation, washed with 2× ether (10 mL/0.1 g resin) and dried to give the crude peptide.

### General Procedure for Purification of Peptides:

[0434] The crude peptides were purified on a Gilson preparative HPLC system running Unipoint® analysis software (Gilson, Inc., Middleton, Wis.) on an Agilent 21.2×250 mm column packed with Zorbax®-C3, 7 μm particles, 300 Å pore size. The temperature of the column was maintained at >60° C. throughout the purification. Three milliliters of crude peptide solution (5 mg/mL in 75:25 formic acid:water) was purified per injection. The peaks containing the product(s) from each run were pooled and lyophilized. All preparative runs were run at 20 mL/min with eluents as buffer A: 0.1% TFA-water and buffer B: acetonitrile using a 1%/minute gradient of B until the products eluted.

### General Procedure for Analytical HPLC:

[0435] Analytical HPLC was performed on a Hitachi D-7000 analytical HPLC system with a dual wavelength detector running D-7000 software on an Agilent 0.46×250 mm column packed with Zorbax®-C3, 5 μm particles, 300 Å pore size eluted with one of the gradient methods listed below after preequilibrating at the starting conditions for 7 min. All analytical runs were run at 1 mL/min with eluents as buffer A: 0.1% TFA-water and buffer B: acetonitrile using a 2%/minute gradient of B for 45 min at 75° C.

[0436] In the following, Aβ peptides and oligomers are referred to as (xXaa1, yXaa2) Aβ(X-Y) peptides and oligomers, wherein Aβ(X-Y) refers to the amino acid sequence from amino acid position X to amino acid position Y of the human amyloid β protein including both X and Y as set forth in SEQ ID NO:1 (corresponding to amino acid positions 1 to 43), and Xaa1 and Xaa2 designate amino acids which replace the amino acid at position x and y, respectively, in SEQ ID NO:1. The term “(xXaa1, yXaa2) Aβ(X-Y)” is synonymous with the term “Aβ(X-Y) (xXaa1/yXaa2)”.

### a) (17C, 34C) N-Met Aβ(1-42) (1a)

[0437] The amyloid β peptide analogue having the amino acid sequence MDAEFRHDSGYEVHHQKCVFFAEDVGSNKGAIIGCMVGGVVIA (SEQ ID NO:961) was prepared as follows.

[0438] Preloaded resin (0.59 g, 100 μmol) was extended using the general peptide synthesis procedure to give the protected resin-bound peptide (0.989 g, 57%). The resin was cleaved and deprotected using the general procedure to give the crude peptide 1a as a white solid (0.319 g, 62.6%). Crude peptide 1a was dissolved in neat formic acid (6.7 mg/mL) and diluted with water (to 5 mg/mL) immediately before HPLC purification with collection based on absorbance at 260 nm. The main peak was isolated and lyophilized giving 1a as a white solid (0.0274 g, 8.5%); deconvoluted ESI-MS m/z=4625.4 [(M+H)⁺].

[0439] The following peptides (1b) to (1j) were synthesized by standard Fmoc Solid Phase synthesis from the C-terminus to the N-terminus. Following synthesis, the peptides are purified by Reverse Phase HPLC. In order to maintain the free sulfhydryl groups on the cysteines (avoid oxidation), an acidic pH was maintained during production (normal procedure). Briefly, the FMOC protecting group was removed from the amino acid that is on the resin. The next amino acid in the sequence was added and coupled to the first amino acid using HBTU. The FMOC protecting group was removed from the 2nd amino acid. The next amino acid in the sequence was added and coupled to the previous amino acid using HBTU. Steps 4 and 5 were repeated until the sequence was complete. The peptide was cleaved from the resin using TFA. The peptide was purified via Reverse Phase HPLC using a TFA/Acetonitrile buffer system (acidic buffer system). The purification fractions which meet Mass and purity spec, were pooled and lyophilized. Mass Spec Analysis and RP-HPLC confirmed identity of peptide.

### b) (14C, 37C) N-Met Aβ(1-42) (1b)

[0440] The amyloid β peptide analogue having the amino acid sequence MDAEFRHDSGYEVHCQKLVFFAEDVGSNKGAIIGLMVCGWIA (SEQ ID NO:962) was prepared using standard peptide chemistry.

### c) (15C, 36C) N-Met Aβ(1-42) (1c)

[0441] The amyloid β peptide analogue having the amino acid sequence MDAEFRHDSGYEVHHCKLVFFAEDVGSNKGAIIGLMCGGVVIA (SEQ ID NO:963) was prepared using standard peptide chemistry.

### d) (16C, 35C) N-Met Aβ(1-42) (1d)

[0442] The amyloid β peptide analogue having the amino acid sequence MDAEFRHDSGYEVHHQCLVFFAEDVGSNKGAIIGLCVGGVVIA (SEQ ID NO:964) was prepared using standard peptide chemistry.

### e) (17C, 34C) N-Met Aβ(1-42) (1e)

[0443] The amyloid β peptide analogue having the amino acid sequence MDAEFRHDSGYEVHHQKCVFFAEDVGSNKGAIIGCMVGGVVIA (SEQ ID NO:965) was prepared using standard peptide chemistry.

### f) (18C, 33C) N-Met Aβ(1-42) (1f)

[0444] The amyloid β peptide analogue having the amino acid sequence MDAEFRHDSGYEVHHQKLCFFAEDVGSNKGAIICLMVGGVVIA (SEQ ID NO:966) was prepared using standard peptide chemistry.

### g) (19C, 32C) N-Met Aβ(1-42) (1g)

[0445] The amyloid β peptide analogue having the amino acid sequence MDAEFRHDSGYEVHHQKLVCFAEDVGSNKGAICGLMVGGVVIA (SEQ ID NO:967) was prepared using standard peptide chemistry.

### h) (20C, 31C) N-Met Aβ(1-42) (1h)

[0446] The amyloid β peptide analogue having the amino acid sequence MDAEFRHDSGYEVHHQKLVFCAEDVGSNKGACIGLMVGGWIA (SEQ ID NO:968) was prepared using standard peptide chemistry.

### i) (21C, 30C) N-Met Aβ(1-42) (1i)

[0447] The amyloid β peptide analogue having the amino acid sequence MDAEFRHDSGYEVHHQKLVFFCEDVGSNKGCIIGLMVGGVVIA (SEQ ID NO:969) was prepared using standard peptide chemistry.

### j) (22C, 29C) N-Met Aβ(1-42) (1j)

[0448] The amyloid β peptide analogue having the amino acid sequence MDAEFRHDSGYEVHHQKLVFFACDVGSNKCAIIGLMVGGVVIA (SEQ ID NO:970) was prepared using standard peptide chemistry.

### k) (17C, 34C) Aβ(12-42) (1k)

[0449] The amyloid β peptide analogue having the amino acid sequence VHHQKCVFFAEDVGSNKGAIIGCMVGGWIA (SEQ ID NO:971) was prepared by the general procedure outlined above using a Fmoc-Ala-Wang resin. Calculated MW [g/mol]: 3186.73; MALDI-MS: obs 3186.7 [(M+H)⁺].

l) (17C(ACM), 34C(ACM)) Aβ(16-35)-amide (1l)

[0450] The amyloid β peptide analogue having the amino acid sequence KC(ACM)VFFAEDVGSNKGAIIGC(ACM)M-amide (SEQ ID NO:972) was prepared by the general procedure outlined above using a Rink-Amide-MBHA resin. Calculated MW [g/mol]: 2230, 67; MALDI-MS: obs 2231.4, 2228.9 [(M+H)⁺].

m) Aβ(16-35)-amide (1m)

[0451] The amyloid β peptide analogue having the amino acid sequence KLVFFAEDVGSNKGAIIGLM-amide (SEQ ID NO:973) was prepared by the general procedure outlined above using a Rink-Amide-MBHA resin. Calculated MW [g/mol]: 2108, 5; MALDI-MS: obs 2108.1 [(M+H)⁺], 2130 [(M+Na)⁺].

n) (17K, 34K) Aβ(16-35)-amide (1n)

[0452] The amyloid β peptide analogue having the amino acid sequence KKVFFAEDVGSNKGAIIGKM-amide (SEQ ID NO:974) was prepared by the general procedure outlined above using a Rink-Amide-MBHA resin. Calculated MW [g/mol]: 2135, 53; MALDI-MS: obs 2137.96 2137.91 [(M+H)⁺].

o) (17C, 34C) Aβ(16-35)-amide, cyclic (1o)

[0453] The amyloid β peptide analogue having the amino acid sequence KC*VFFAEDVGSNKGAIIGC*M-amide (SEQ ID NO:975) was prepared by the general procedure outlined above. Disulfide cyclization was accomplished by dissolving the linear precursor peptide (17C, 34C) Aβ(16-35)-amide (1p) at 18 mg/mL in dimethylsulfoxide and added in one aliquot to vacuum degassed 3:2 100 mM ammonium bicarbonate:acetonitrile (200 mL, v:v). Potassium ferricyanide solution (0.05% w/v in water, 44.3 mL) was added in one portion and the reaction stirred for 2 h at ambient. The yellow solution was lyophilized to dryness prior to purification and analysis using the general procedures described above to give the cyclized (17C, 34C) Aβ(16-35)-amide. Calculated MW [g/mol]: 2086.46; MALDI-MS: obs 2086.6 [(M+H)⁺], 2108.6 [(M+Na)⁺].

p) (17C, 34C) Aβ(16-35)-amide (1p)

[0454] The amyloid β peptide analogue having the amino acid sequence KCVFFAEDVGSNKGAIIGCM-amide (SEQ ID NO:976) was prepared by the general procedure outlined above using a Rink-Amide-MBHA resin. Calculated MW [g/mol]: 2088.47; MALDI-MS: obs 2087.99 [(M+H)⁺], 2109.98 [(M+Na)⁺].

### q) (17K, 34K) N-Met Aβ(1-42) (1q)

[0455] The amyloid β peptide analogue having the amino acid sequence MDAEFRHDSGYEVHHQKKVFFAEDVGSNKGAIIGKMVGGVVIA (SEQ ID NO:977) was prepared by the general procedure outlined above using a H-Ala-HMPB NovaPEG resin. Calculated MW [g/mol]: 4675, 26; MALDI-MS: obs 4680.16 [(M+H)⁺].

### r) (17KC, 34C) Aβ(13-42) (1r)

[0456] The amyloid β peptide analogue having the amino acid sequence HHQKKCVFFAEDVGSNKGAIIGCMVGGWIA (SEQ ID NO:978) was prepared by the general procedure outlined above using a Fmoc-Ala-Wang resin. Calculated MW [g/mol]: 3215.77; MALDI-MS: obs 3214.72 [(M+H)⁺].

### s) (17C, 34C) Aβ(16-42) (1s)

[0457] The amyloid β peptide analogue having the amino acid sequence KCVFFAEDVGSNKGAIIGCMVGGVVIA (SEQ ID NO:979) was prepared by the general procedure outlined above using a Fmoc-Ala-Wang resin. Calculated MW [g/mol]: 2685.19; MALDI-MS: obs 2683.82 [(M+H)⁺], 2705.84 [(M+Na)⁺].

t) (17C(ACM), 34C(ACM), 35M(S-oxide)) Aβ(16-35)-amide (1t)

[0458] The amyloid β peptide analogue having the amino acid sequence KC(ACM)VFFAEDVGSNKGAIIGC(ACM)M(S-oxide)-amide (SEQ ID NO:980) was prepared by the general procedure outlined above using a Fmoc-Ala-Wang resin. Calculated MW [g/mol]: 2246.67; MALDI-MS: obs 2245.48 [(M+H)⁺].

u) (17C(ACM), 34C(ACM)) Aβ(16-35)-amide (1u)

[0459] The amyloid β peptide analogue having the amino acid sequence KC(ACM)VFFAEDVGSNKGAIIGC(ACM)M-amide (SEQ ID NO:981) was prepared by the general procedure outlined above using a Rink Amide MBHA resin. Calculated MW [g/mol]: 2230.67; MALDI-MS: obs 2229.45 [(M+H)⁺].

v) (17K, 34E) Aβ(16-35)-amide (1v)

[0460] The amyloid β peptide analogue having the amino acid sequence KKVFFAEDVGSNKGAIIGEM-amide (SEQ ID NO:982) was prepared by the general procedure outlined above using a PEGA-Novabiochem resin. Calculated MW [g/mol]: 2139.47; MALDI-MS: obs 2161.1 [(M+Na)⁺].

### w) (17K, 34C) N-Met Aβ(1-42) (1w)

[0461] The amyloid β peptide analogue having the amino acid sequence MDAEFRHDSGYEVHHQKKVFFAEDVGSNKGAIIGCMVGGWIA (SEQ ID NO:983) was prepared by the general procedure outlined above using a Fmoc-Ala-Wang resin. Calculated MW [g/mol]: 4650.23; MALDI-MS: obs 4651.07 [(M+H)⁺].

### x) (17K, 34E) N-Met Aβ(1-42) (1x)

[0462] The amyloid β peptide analogue having the amino acid sequence MDAEFRHDSGYEVHHQKKVFFAEDVGSNKGAIIGEMVGGWIA (SEQ ID NO:984) was prepared by the general procedure outlined above using a Fmoc-Ala-Wang resin. Calculated MW [g/mol]: 4676.21; MALDI-MS: obs 4676.2 [(M+H)⁺].

### y) (17C, 34C) N-Met Aβ(1-42) (1y)

[0463] The amyloid β peptide analogue having the amino acid sequence MDAEFRHDSGYEVHHQKCVFFAEDVGSNKGAIIGCMVGGVVIA (SEQ ID NO:985) was prepared by the general procedure outlined above using a Fmoc-Ala-Wang resin. Calculated MW [g/mol]: 4625.21; MALDI-MS: obs 4625.52 [(M+H)⁺].

z) (22C*, 29C*) Aβ(16-35)-amide, cyclised (1z)

[0464] The amyloid β peptide analogue having the amino acid sequence KKVFFAC*DVGSNKC*AIIGKM-amide (SEQ ID NO:986) can be prepared by the general procedure outlined above and using the cyclization method described for peptide (1o).

aa) (22C, 29C) Aβ(16-35)-amide (1aa)

[0465] The amyloid β peptide analogue having the amino acid sequence KKVFFACDVGSNKCAIIGKM-amide (SEQ ID NO:987) can be prepared by the general procedure outlined above.

### ab) (F20->FA19501, L17C, L34C) N-Met Aβ(1-42) (1ab)

[0466] The amyloid β peptide analogue having the amino acid sequence MDAEFRHDSGYEVHHQKCVF-FA19501-AEDVGSNKGAIIGCMVGGVVIA (SEQ ID NO:988) can be prepared by the general procedure outlined above using a Fmoc-Ala-Wang resin. FA19501 is the catalog number for Fmoc-cis-3-phenyl-pyrrolidine-2-carboxylic acid that can be incorporated as for the normal amino acids in the peptide.

### ac) (22C, 29C) Aβ(20-35) (1ac)

[0467] The amyloid β peptide analogue having the amino acid sequence FACDVGSNKCAIIGLM (SEQ ID NO:989) can be prepared by the general procedure outlined above using a Fmoc-Ala-Wang resin.

### ad) (22C, 29C) Aβ(20-42) (1ad)

[0468] The amyloid β peptide analogue having the amino acid sequence FACDVGSNKCAIIGLMVGGVVIA (SEQ ID NO:990) can be prepared by the general procedure outlined above using a Fmoc-Ala-Wang resin.

### ae) (17C, 22C, 29C, 34C) Aβ(20-42) N-Met Aβ(1-42) (1ae)

[0469] The amyloid β peptide analogue having the amino acid sequence MDAEFRHDSGYEVHHQKCVFFACDVGSNKCAIIGCMVGGWIA (SEQ ID NO:991) can be prepared by the general procedure outlined above using a Fmoc-Ala-Wang resin.

### af) (K28G29->FA12401, L17C, L34C) N-Met Aβ(1-42) (1af)

[0470] The amyloid β peptide analogue having the amino acid sequence MDAEFRHDSGYEVHHQKCVFFAEDVGSN-FA12401-AIIGCMVGGVVIA (SEQ ID NO:992) can be prepared by the general procedure outlined above using a Fmoc-Ala-Wang resin. FA12401 is the catalog number for Fmoc-3-amino-1-carboxymethyl-pyridin-2-one can be incorporated as for the normal amino acids in the peptide.

### Example 2

### Preparation of Oligomer

[0471] a) Dissulfide stabilized (17C, 34C) N-Met Aβ(1-42) oligomer (2a)

[0472] 83.1 mg synthetic (17C, 34C) N-Met Aβ(1-42) (1a) of example 1a, TFA salt was treated with HFIP, (1 ml for every 6 mg peptide) and the solvent removed by lyophilization. This was dissolved into 4.0 ml of DMSO. This DMSO solution of the peptide was then added slowly to 45 mL of 20 mM PBS (20 mM NaH₂PO₄, 140 mM NaCl, pH 7.4), containing 0.2% SDS (sodium dodecylsulfate), with stirring. This solution was then made 5 mM in DTT (dithiothrietol) and incubated 6 hours 37° C.

[0473] The sample was then diluted with 3 parts water, and dialyzed overnight at room temperature against ¼th strength PBS with 0.05% SDS, using 3500 MWCO dialysis membrane. The dialysis was continued the next morning against 1 L fresh buffer at 4° C. for 2 hours.

[0474] The sample was then concentrated using a YM10 membrane in an Amicon stirred cell. A 0.5 ml aliquot was dialyzed overnight at 4° C. against/4th strength PBS with no SDS using a Pierce 10K slidelyzer.

### Example 3

### Preparation of Oligomers

[0475] a) (14C, 37C) N-Met Aβ(1-42) oligomer (3a)

[0476] (14C, 37C) N-Met Aβ(1-42) peptide (1b) of example 1b was suspended in 100% 1,1,1,3,3,3-hexafluoro-2-propanol (HFIP) at 4 mg/mL and incubated for complete solubilization under shaking at 37° C. for 2 h. The HFIP acts as a hydrogen-bond breaker and is used to eliminate pre-existing structural inhomogeneities in the Aβ peptide. HFIP was removed by evaporation in a SpeedVac and the Aβ peptide dissolved or suspended at a concentration of 5 mM in dimethylsulfoxide and sonicated for 20 s. 20 μl of the HFIP-pre-treated Aβ peptide in DMSO were diluted to 400 μM peptide concentration with 230 μl phosphate-buffered saline (PBS)+0.2% SDS+2 mM DTT (9.8 ml Helium aerated 20 mM NaH₂PO₄, 140 mM NaCl, pH 7.4+0.2 ml 10% SDS solution dissolved in H₂O+3 mg DTT, Serva, Cat. no.: 20710). An incubation for 6 h at 37° C. resulted in the 16/20-kDa (xC, yC) N-Met Aβ(1-42) intermediate and Aβ(1-42) intermediate. The 38/48-kDa (xC, yC) N-Met Aβ(1-42) oligomer was generated by a further dilution with three volumes of Helium aerated H₂O and incubation for 18 h at 37° C. After centrifugation at 10,000 g for 10 min the supernatants were removed and stored at −30° C. until further use.

b) (15C, 36C) N-Met Aβ(1-42) oligomer (3b)

[0477] (15C, 36C) N-Met Aβ(1-42) peptide (1c) of example 1c was subjected to oligomerization using the procedure described example 3a.

c) (16C, 35C) N-Met Aβ(1-42) oligomer (3c)

[0478] (16C, 35C) N-Met Aβ(1-42) peptide (1d) of example 1d was subjected to oligomerization using the procedure described example 3a.

d) (17C, 34C) N-Met Aβ(1-42) oligomer (3d)

[0479] (17C, 34C) N-Met Aβ(1-42) peptide (1e) of example 1e was subjected to oligomerization using the procedure described example 3a.

e) (18C, 33C) N-Met Aβ(1-42) oligomer (3e)

[0480] (18C, 33C) N-Met Aβ(1-42) peptide (1f) of example if was subjected to oligomerization using the procedure described example 3a.

f) (19C, 32C) N-Met Aβ(1-42) oligomer (3f)

[0481] (19C, 32C) N-Met Aβ(1-42) peptide (1g) of example 1g was subjected to oligomerization using the procedure described example 3a.

g) (20C, 31C) N-Met Aβ(1-42) oligomer (3g)

[0482] (20C, 31C) N-Met Aβ(1-42) peptide (1 h) of example 1h was subjected to oligomerization using the procedure described example 3a.

h) (21C, 30C) N-Met Aβ(1-42) oligomer (3h)

[0483] (21C, 30C) N-Met Aβ(1-42) peptide (11) of example 11 was subjected to oligomerization using the procedure described example 3a.

i) (22C, 29C) N-Met Aβ(1-42) oligomer (3i)

[0484] (22C, 29C) N-Met Aβ(1-42) peptide (1j) of example 1j was subjected to oligomerization using the procedure described example 3a.

j) Aβ(1-42) globulomer (3j)

[0485] Aβ(1-42) wilde type peptide (Bachem H-1368) was subjected to oligomerization using the procedure described example 3a.

k) (17C, 34C) Aβ(12-42) oligomer (3k)

[0486] (17C, 34C) Aβ(12-42) peptide (1k) of example 1k was subjected to oligomerization using the procedure described example 2a, with the following modification. Following HFIP treatment, the peptide was dissolved in 1% ammonia in 35% acetonitrile/65% water and incubated for about 30 min at RT to form the ammonium salt. This salt was then shell frozen and lyophilized to dryness overnight. Oligomerization was then completed to the 0.05% SDS step as described in example 2a.

[0487] (17C, 34C) Aβ(12-42) peptide (1k) of example 1k was treated with HFIP (1 ml for every 6 mg peptide) and the solvent removed by lyophilization. Following HFIP treatment, the peptide was dissolved in 1% ammonia in 35% acetonitrile/65% water and incubated for about 30 min at RT to form the ammonium salt. This salt was then shell frozen and lyophilized to dryness overnight. This was then dissolved into 4.0 ml of DMSO. This DMSO solution of the peptide was then added slowly to 45 mL of 20 mM PBS (20 mM NaH₂PO₄, 140 mM NaCl, pH 7.4), containing 0.2% SDS (sodium dodecylsulfate), with stirring. This solution was then made 5 mM in DTT (dithiothrietol) and incubated 6 hours 37° C.

l) (17C(ACM), 34C(ACM)) Aβ(16-35) oligomer (3l)

[0488] (17C(ACM), 34C(ACM)) Aβ(16-35) peptide (1l) was subjected to oligomerization using the procedure described example 3k, with the exception that no DTT was used.

m) Aβ(16-35)-amide oligomer (3m)

[0489] Aβ(16-35)-amide peptide (1 m) was subjected to oligomerization using the procedure described example 3k, with the exception that no DTT was used.

n) (17K, 34K) Aβ(16-35)-amide oligomer (3n)

[0490] Subjecting (17K, 34K) Aβ(16-35)-amide peptide (1n) to oligomerization using the procedure described example 3k (without DTT being used) will yield the oligomer.

o) [(17C, 34C) Aβ(16-35)-amide, cyclic] oligomer (3o)

[0491] [(17C, 34C) Aβ(16-35)-amide, cyclic] peptide (1o) was subjected to oligomerization using the procedure described example 3k, with the exception that no DTT was used.

p) (17C, 34C) Aβ(16-35)-amide oligomer (3p)

[0492] (17C, 34C) Aβ(16-35)-amide peptide (1p) was subjected to oligomerization using the procedure described example 3k.

q) (17K, 34K) N-Met Aβ(1-42) oligomer (3q)

[0493] Subjecting (17K, 34K) N-Met Aβ(1-42) peptide (1q) to oligomerization using the procedure described example 3k (without DTT being used) will yield the oligomer.

r) (17KC, 34C) Aβ(13-42) oligomer (3r)

[0494] (17KC, 34C) Aβ(13-42) peptide (1r) was subjected to oligomerization using the procedure described example 3k.

s) (17C, 34C) Aβ(16-42) oligomer (3s)

[0495] (17C, 34C) Aβ(16-42) peptide (1s) was subjected to oligomerization using the procedure described example 3k.

t) (17C(ACM), 34C(ACM), 35M(S-oxide)) Aβ(16-35)-amide oligomer (3t)

[0496] Subjecting (17C(ACM), 34C(ACM), 35M(S-oxide)) peptide (1t) to oligomerization using the procedure described example 3k (without DTT being used) will yield the oligomer.

u) (17C(ACM), 34C(ACM)) Aβ(16-35)-amide oligomer (3u)

[0497] (17C(ACM), 34C(ACM)) peptide (1u) was subjected to oligomerization using the procedure described example 3k, with the exception that no DTT was used.

v) (17K, 34E) Aβ(16-35) oligomer (3v)

[0498] (17K, 34E) Aβ(16-35) peptide (1v) was subjected to oligomerization using the procedure described example 3k, with the exception that no DTT was used.

w) (17K, 34C) N-Met Aβ(1-42) oligomer (3w)

[0499] (17K, 34C) N-Met Aβ(1-42) peptide (1w) was subjected to oligomerization using the procedure described example 3k, with the exception that no DTT was used.

x) (17K, 34E) N-Met Aβ(1-42) oligomer (3x)

[0500] (17K, 34E) N-Met Aβ(1-42) peptide (1x) was subjected to oligomerization using the procedure described example 3k, with the exception that no DTT was used.

y) (17C, 34C) N-Met Aβ(1-42) oligomer (3y)

[0501] (17C, 34C) N-Met Aβ(1-42) peptide (1y) was subjected to oligomerization using the procedure described example 3k.

z) [(22C*, 29C*) Aβ(16-35)-amide, cyclised] oligomer (3z)

[0502] Subjecting [(E22C*, G29C*) Aβ(16-35)-amide, cyclised] peptide (1z) to oligomerization using the procedure described example 3k will yield the oligomer.

aa) (22C, 29C) Aβ(16-35)-amide oligomer (3aa)

[0503] Subjecting (22C, 29C) Aβ(16-35)-amide peptide (1 aa) to oligomerization using the procedure described example 3k will yield the oligomer.

ab) (F20->FA19501, L17C, L34C) N-Met Aβ(1-42) oligomer (3ab)

[0504] Subjecting (F20->FA19501, L17C, L34C) N-Met Aβ(1-42) peptide (1ab) to oligomerization using the procedure described example 3k will yield the oligomer.

ac) (22C, 29C) Aβ(20-35) oligomer (3ac)

[0505] Subjecting (22C, 29C) Aβ(20-35) peptide (1 ac) to oligomerization using the procedure described example 3k will yield the oligomer.

ad) (22C, 29C) Aβ(20-42) oligomer (3ad)

[0506] Subjecting (22C, 29C) Aβ(20-42) peptide (lad) to oligomerization using the procedure described example 3k will yield the oligomer.

ae) (17C, 22C, 29C, 34C) Aβ(20-42) N-Met Aβ(1-42) oligomer (3ae)

[0507] Subjecting (17C, 22C, 29C, 34C) Aβ(20-42) N-Met Aβ(1-42) peptide (1ae) to oligomerization using the procedure described example 3k will yield the oligomer.

af) (K28G29->FA12401, L17C, L34C) N-Met Aβ(1-42) oligomer (3af)

[0508] Subjecting (K28G29->FA12401, L17C, L34C) N-Met Aβ(1-42) peptide (1af) to oligomerization using the procedure described example 3k will yield the oligomer.

### Example 4

### Linkage Formation

[0509] a) Disulfide-stabilized (14C, 37C) N-Met Aβ(1-42) oligomer (4a)

[0510] 1 ml of the (14C, 37C) N-Met Aβ(1-42) oligomer (3a) of example 3a was thawed and dialysed in a dialysis tube two times for 2 h at room temperature against 2 L 5 mM NaH₂PO₄, 35 mM NaCl, pH 7.4. Subsequently the dialysates were removed and the protein concentrations were determined by the Bio-Rad Protein Assay, BioRad, Cat. no.: 500-0006.

b) Disulfide-stabilized (15C, 36C) N-Met Aβ(1-42) oligomer (4b)

[0511] (15C, 36C) N-Met Aβ(1-42) oligomer (3b) of example 3b was subjected to oxidation using the procedure described example 4a.

c) Disulfide-stabilized (16C, 35C) N-Met Aβ(1-42) oligomer (4c)

[0512] (16C, 35C) N-Met Aβ(1-42) oligomer (3c) of example 3c was subjected to oxidation using the procedure described example 4a.

d) Disulfide-stabilized (17C, 34C) N-Met Aβ(1-42) oligomer (4d)

[0513] (17C, 34C) N-Met Aβ(1-42) oligomer (3d) of example 3d was subjected to oxidation using the procedure described example 4a.

e) Disulfide-stabilized (18C, 33C) N-Met Aβ(1-42) oligomer (4e)

[0514] (18C, 33C) N-Met Aβ(1-42) oligomer (3e) of example 3e was subjected to oxidation using the procedure described example 4a.

f) Disulfide-stabilized (19C, 32C) N-Met Aβ(1-42) oligomer (4f)

[0515] (19C, 32C) N-Met Aβ(1-42) oligomer (3f) of example 3f was subjected to oxidation using the procedure described example 4a.

g) Disulfide-stabilized (20C, 31C) N-Met Aβ(1-42) oligomer (4g)

[0516] (20C, 31C) N-Met Aβ(1-42) oligomer (3g) of example 3g was subjected to oxidation using the procedure described example 4a.

h) Disulfide-stabilized (21C, 30C) N-Met Aβ(1-42) oligomer (4h)

[0517] (21C, 30C) N-Met Aβ(1-42) oligomer (3h) of example 3h was subjected to oxidation using the procedure described example 4a.

i) Disulfide-stabilized (22C, 29C) N-Met Aβ(1-42) oligomer (4i)

[0518] (22C, 29C) N-Met Aβ(1-42) oligomer (31) of example 31 was subjected to oxidation using the procedure described example 4a.

j) Aβ(1-42) globulomer (4j)

[0519] Aβ(1-42) wilde type globulomer (Bachem H-1368) (3j) of example 3j was subjected to oxidation using the procedure described example 4a.

k) Disulfide-stabilized (17C, 34C) Aβ(12-42) oligomer (4k)

[0520] (17C, 34C) Aβ(12-42) oligomer (3k) was diluted with 3 parts water, and dialyzed overnight at room temperature against ¼th strength PBS with 0.05% SDS, using 3500 MWCO dialysis membrane. The dialysiswas continued the next morning against 1 L fresh buffer at 4° C. for 2 hours.

[0521] The sample was then concentrated using a YM10 membrane in an Amicon stirred cell. The sample can also be concentrated using Millipore UltraMax centrifugal concentrators with a 10 kDa cut-off membrane.

l) (17C(ACM), 34C(ACM)) Aβ(16-35) oligomer (4l)

[0522] (17C(ACM), 34C(ACM)) Aβ(16-35) oligomer (3l) does not form cysteine bridges.

m) Aβ(16-35)-amide oligomer (4m)

[0523] Aβ(16-35)-amide oligomer (3m) does not form cross-links.

n) Cross-linked (17K, 34K) Aβ(16-35)-amide oligomer (4n)

[0524] Subjecting (17K, 34K) Aβ(16-35)-amide oligomer (3n) to conditions suitable for cross-linking two amine groups will yield the product.

o) [(17C, 34C) Aβ(16-35)-amide, cyclic] oligomer (4o)

[0525] [(17C, 34C) ARO 6-35)-amide, cyclic] oligomer (3o) already comprises a linkage.

p) Disulfide-stabilized (17C, 34C) ARO 6-35)-amide oligomer (4p)

[0526] (17C, 34C) Aβ(16-35)-amide oligomer (3p) was subjected to dialysis in order to remove the DTT and effect disulfide formation, as described in example 4k.

q) Cross-linked (17K, 34K) N-Met Aβ(1-42) oligomer (4q)

[0527] Subjecting (17K, 34K) N-Met Aβ(1-42) oligomer (3q) to conditions suitable for cross-linking two amine groups will yield the product.

r) Disulfide-stabilized (17KC, 34C) Aβ(13-42) oligomer (4r)

[0528] (17KC, 34C) Aβ(13-42) oligomer (3r) was subjected to dialysis in order to remove the DTT and effect disulfide formation, as described in example 4k.

s) Disulfide-stabilized (17C, 34C) Aβ(16-42) oligomer (4s)

[0529] (17C, 34C) Aβ(16-42) oligomer (3s) was subjected to dialysis in order to remove the DTT and effect disulfide formation, as described in example 4k.

t) (17C(ACM), 34C(ACM), 35M(S-oxide)) Aβ(16-35)-amide oligomer (4t)

[0530] (17C(ACM), 34C(ACM), 35M(S-oxide)) Aβ(16-35)-amide oligomer (3t) does not form cysteine bridges.

u) (17C(ACM), 34C(ACM)) Aβ(16-35)-amide oligomer (4u)

[0531] (17C(ACM), 34C(ACM)) Aβ(16-35)-amide oligomer (3u) does not form cysteine bridges.

v) EDC/NHS-linked (17K, 34E) Aβ(16-35) oligomer (4v)

[0532] Subjecting (17K, 34E) Aβ(16-35) oligomer (3v) to the procedure of example 4x will yield the product.

w1) SMCC-linked (17K, 34C) N-Met Aβ(1-42) oligomer (4w1)

[0533] (17K, 34C) N-Met Aβ(1-42) oligomer (3w) of example 3w in 0.05% SDS (2.37 mM peptide) were cross-linked with 11 mM sulfo-SMCC (Pierce cat #22622, supplied from a 100 mM stock in anhydrous DMSO) for 1 hr at room temperature. The reaction was quenched by the addition of 10 mM ethanolamine from a 100 mM, pH 8 aqueous stock solution. The excess reagent and reaction products were removed by dialysis vs. 5 mM NaPO₄, 35 mM NaCl, 0.05% SDS, pH 7.4 using a Slide-A-Lyzer with a 2000 Da mw cut-off membrane. The final concentration was determined using the BCA protein Assay (Pierce).

w2) MBS-linked (17K, 34C) N-Met Aβ(1-42) oligomer (4w2)

[0534] (17K, 34C) N-Met Aβ(1-42) oligomer (3w) of example 3w in 0.05% SDS (2.47 mM peptide) were cross-linked with 12 mM sulfo-MBS (Pierce cat #22312, supplied from a 100 mM stock in anhydrous DMSO) for 1 hr at room temperature. The reaction was quenched by the addition of 10 mM ethanolamine from a 100 mM, pH 8 aqueous stock solution. The excess reagent and reaction products were removed by dialysis vs. 5 mM NaPO₄, 35 mM NaCl, 0.05% SDS, pH 7.4 using a Slide-A-Lyzer with a 2000 Da MW cut-off membrane. The final concentration was determined using the BCA protein Assay (Pierce).

w3) SIAB-linked (17K, 34C) N-Met Aβ(1-42) oligomer (4w3)

[0535] (17K, 34C) N-Met Aβ(1-42) oligomer (3w) of example 3w in 0.05% SDS (2.47 mM peptide) were cross-linked with 12 mM sulfo-SIAB (Pierce cat #22327, supplied from a 100 mM stock in anhydrous DMSO) for 1 hr at room temperature. The reaction was quenched by the addition of 10 mM ethanolamine from a 100 mM, pH 8 aqueous stock solution. The excess reagent and reaction products were removed by dialysis vs. 5 mM NaPO₄, 35 mM NaCl, 0.05% SDS, pH 7.4 using a Slide-A-Lyzer with a 2000 Da MW cut-off membrane. The final concentration was determined using the BCA protein Assay (Pierce).

x) EDC/NHS-linked (17K, 34E) N-Met Aβ(1-42) oligomer (4x)

[0536] (17K, 34E) N-Met Aβ(1-42) oligomer (3x) of example 3x in 0.05% SDS (2.14 mM peptide) were cross-linked using 20 mM EDC (Pierce cat #22980, supplied from a 100 mM aqueous stock) and 50 mM sulfo-NHS (Pierce cat #24520, supplied from a 100 mM aqueous stock) for 1 hr at room temperature. The excess reagent and reaction products were removed by dialysis vs. 5 mM NaPO₄, 35 mM NaCl, 0.05% SDS, pH 7.4 using a Slide-A-Lyzer with a 2000 Da MW cut-off membrane. The final concentration was determined using the BCA protein Assay (Pierce).

y) Disulfide-stabilized (17C, 34C) N-Met Aβ(1-42) oligomer (4y)

[0537] (17C, 34C) N-Met Aβ(1-42) oligomer (3y) was subjected to dialysis in order to remove the DTT and effect disulfide formation, as described in example 4k.

z) [(E22C*, G29C*) Aβ(16-35)-amide, cyclised] oligomer (4z)

[0538] [(22C*, 29C*) Aβ(16-35)-amide, cyclised] oligomer (3z) already comprises a linkage.

aa) Disulfide-stabilized (22C, 29C) Aβ(16-35)-amide oligomer (4aa)

[0539] Subjecting (22C, 29C) Aβ(16-35)-amide oligomer (3aa) to dialysis in order to remove the DTT and effect disulfide formation, as described in example 4k, will yield the product.

ab) Disulfide-stabilized (F20->FA19501, 17C, 34C) N-Met Aβ(1-42) oligomer (4ab)

[0540] Subjecting (F20->FA19501, L17C, L34C) N-Met Aβ(1-42) oligomer (3ab) to dialysis in order to remove the DTT and effect disulfide formation, as described in example 4k, will yield the product.

ac) Disulfide-stabilized (22C, 29C) Aβ(20-35) oligomer (4ac)

[0541] Subjecting (22C, 29C) Aβ(20-35) oligomer (3ac) to dialysis in order to remove the DTT and effect disulfide formation, as described in example 4k, will yield the product.

ad) Disulfide-stabilized (22C, 29C) Aβ(20-42) oligomer (3ad)

[0542] Subjecting (22C, 29C) Aβ(20-42) oligomer (3ad) to dialysis in order to remove the DTT and effect disulfide formation, as described in example 4k, will yield the product.

ae) Disulfide-stabilized (17C, 22C, 29C, 34C) Aβ(20-42) N-Met Aβ(1-42) oligomer (4ae)

[0543] Subjecting 17C, 22C, 29C, 34C) Aβ(20-42) N-Met Aβ(1-42) oligomer (3ae) to dialysis in order to remove the DTT and effect disulfide formation, as described in example 4k, will yield the product.

af) Disulfide-stabilized (K28G29->FA12401, 17C, 34C) N-Met Aβ(1-42) oligomer (4af)

[0544] Subjecting (K28G29->FA12401, 17C, 34C) N-Met Aβ(1-42) oligomer (3af) to dialysis in order to remove the DTT and effect disulfide formation, as described in example 4k, will yield the product.

### Example 5

### Thermolysin Truncation

[0545] a) Thermolysin truncation of disulfide-stabilized (14C, 37C) N-Met Aβ(1-42) oligomer (5a)

[0546] 0.5 ml of disulfide-stabilized (14C, 37C) N-Met Aβ(1-42) oligomer (4a) of example 4a was added with 1/91 Thermolysin w/w (Roche, Cat. no.: 161586). Thermolysin was dissolved with a concentration of 1 mg/ml in H₂O (freshly prepared). The samples were incubated under shaking for 20 h at 30° C. Then 2.5 μl of a 100 mM EDTA solution, pH 7.4, in water were added and the samples were shaken for 5 min at room temperature. The samples were subsequently adjusted to an SDS content of 0.1% with 5 μl of a 10% strength SDS solution. Samples were shaken for 10 min at room temperature. Subsequently the samples were concentrated to approx. 20 μl via a 0.4 ml 30 kDa Ultrafree-MC tube (Amicon, Cat. no.: UFC3LTK00). The concentrates were admixed with 0.2 ml of buffer (5 mM NaH₂PO₄, 35 mM NaCl, pH 7.4) and again concentrated to 20 μl using the 30 kDa Ultrafree-MC tubes (Amicon, Cat. no.: UFC3LTK00). Then the concentrates were adjusted with 0.38 ml of buffer (5 mM NaH₂PO₄, 35 mM NaCl, pH 7.4) to a final volume of 0.4 ml. Subsequently, the samples were adjusted to an SDS content of 0.05% with 2 μl of a 10% strength SDS solution and stored at −30° C. until further use.

b) Thermolysin truncation of disulfide-stabilized (15C, 36C) N-Met Aβ(1-42) oligomer (5b)

[0547] Disulfide-stabilized (15C, 36C) N-Met Aβ(1-42) oligomer (4b) of example 4b was subjected to thermolysin truncation using the procedure described example 5a.

c) Thermolysin truncation of disulfide-stabilized (16C, 35C) N-Met Aβ(1-42) oligomer (5c)

[0548] Disulfide-stabilized (16C, 35C) N-Met Aβ(1-42) oligomer (4c) of example 4c was subjected to thermolysin truncation using the procedure described example 5a.

d) Thermolysin truncation of disulfide-stabilized (17C, 34C) N-Met Aβ(1-42) oligomer (5d)

[0549] Disulfide-stabilized (17C, 34C) N-Met Aβ(1-42) oligomer (4d) of example 4d was subjected to thermolysin truncation using the procedure described example 5a.

e) Thermolysin truncation of disulfide-stabilized (18C, 33C) N-Met Aβ(1-42) oligomer (5e)

[0550] Disulfide-stabilized (18C, 33C) N-Met Aβ(1-42) oligomer (4e) of example 4e was subjected to thermolysin truncation using the procedure described example 5a.

f) Thermolysin truncation of disulfide-stabilized (19C, 32C) N-Met Aβ(1-42) oligomer (5f)

[0551] Disulfide-stabilized (19C, 32C) N-Met Aβ(1-42) oligomer (4f) of example 4f was subjected to thermolysin truncation using the procedure described example 5a.

g) Thermolysin truncation of disulfide-stabilized (20C, 31C) N-Met Aβ(1-42) oligomer (5g)

[0552] Disulfide-stabilized (20C, 31C) N-Met Aβ(1-42) oligomer (4g) of example 4g was subjected to thermolysin truncation using the procedure described example 5a.

h) Thermolysin truncation of disulfide-stabilized (21C, 30C) N-Met Aβ(1-42) oligomer (5h)

[0553] Disulfide-stabilized (21C, 30C) N-Met Aβ(1-42) oligomer (4h) of example 4h was subjected to thermolysin truncation using the procedure described example 5a.

i) Thermolysin truncation of disulfide-stabilized (22C, 29C) N-Met Aβ(1-42) oligomer (5i)

[0554] Disulfide-stabilized (22C, 29C) N-Met Aβ(1-42) oligomer (4i) of example 41 was subjected to thermolysin truncation using the procedure described example 5a.

j) Thermolysin truncation of Aβ(1-42) globulomer (5j)

[0555] Aβ(1-42) wilde type globulomer (Bachem H-1368) (4j) of example 4j was subjected to thermolysin truncation using the procedure described example 5a.

k) Thermolysin truncation of disulfide stabilized (17C, 34C) Aβ(12-42) oligomer (5k)

[0556] Disulfide stabilized (17C, 34C) Aβ(12-42) oligomer (4k) of example 4k was subjected to thermolysin truncation using the procedure described example 5a.

l) Thermolysin truncation of (17C(ACM), 34C(ACM)) Aβ(16-35) oligomer (5l)

[0557] (17C(ACM), 34C(ACM)) Aβ(16-35) oligomer (31) was subjected to thermolysin truncation using the procedure described example 5a.

m) Thermolysin truncation of Aβ(16-35)-amide oligomer (5m)

[0558] Aβ(16-35)-amide oligomer (3m) of example 3m was subjected to thermolysin truncation using the procedure described example 5a.

n) Thermolysin truncation of (17K, 34K) Aβ(16-35)-amide oligomer (5n)

[0559] Subjecting (17K, 34K) Aβ(16-35)-amide oligomer (3n) to thermolysin truncation using the procedure described example 5a will yield the product.

o) Thermolysin truncation of [(17C, 34C) Aβ(16-35)-amide, cyclic] oligomer (5o)

[0560] [(17C, 34C) Aβ(16-35)-amide, cyclic] oligomer (3o) of example 3o was subjected to thermolysin truncation using the procedure described example 5a.

p) Thermolysin truncation of disulfide stabilized (17C, 34C) Aβ(16-35)-amide oligomer (5p)

[0561] Disulfide stabilized (17C, 34C) Aβ(16-35)-amide oligomer (4p) of example 4p was subjected to thermolysin truncation using the procedure described example 5a.

q) Thermolysin truncation of (17K, 34K) N-Met Aβ(1-42) oligomer (5q)

[0562] Subjecting (17K, 34K) N-Met Aβ(1-42) oligomer (3q) to thermolysin truncation using the procedure described example 5a will yield the product.

r) Thermolysin truncation of disulfide stabilized (17KC, 34C) Aβ(13-42) oligomer (5r)

[0563] Subjecting disulfide stabilized (17KC, 34C) Aβ(13-42) oligomer (4r) of example 4r to thermolysin truncation using the procedure described example 5a will yield the product.

s) Thermolysin truncation of disulfide stabilized (17C, 34C) Aβ(16-42) oligomer (5s)

[0564] Disulfide stabilized (17C, 34C) Aβ(16-42) oligomer (4s) of example 4s was subjected to thermolysin truncation using the procedure described example 5a.

t) Thermolysin truncation of (17C(ACM), 34C(ACM), 35M(S-oxide)) Aβ(16-35)-amide oligomer (53t)

[0565] Subjecting (17C(ACM), 34C(ACM), 35M(S-oxide)) Aβ(16-35)-amide oligomer (3t) to thermolysin truncation using the procedure described example 5a will yield the product.

u) Thermolysin truncation of (17C(ACM), 34C(ACM)) Aβ(16-35)-amide oligomer (5u)

[0566] Subjecting (17C(ACM), 34C(ACM)) Aβ(16-35)-amide oligomer (3u) to thermolysin truncation using the procedure described example 5a will yield the product.

v) Thermolysin truncation of (17K, 34E) Aβ(16-35) oligomer (5v)

[0567] Subjecting (17K, 34E) Aβ(16-35) oligomer (3v) to thermolysin truncation using the procedure described example 5a will yield the product.

w1) Thermolysin truncation of SMCC-linked (17K, 34C) N-Met Aβ(1-42) oligomer (5w)

[0568] Subjecting SMCC-linked (17K, 34C) N-Met Aβ(1-42) oligomer (4w1) to thermolysin truncation using the procedure described example 5a will yield the product.

w2) Thermolysin truncation of MBS-linked (17K, 34C) N-Met Aβ(1-42) oligomer (5w)

[0569] Subjecting MBS-linked (17K, 34C) N-Met Aβ(1-42) oligomer (4w2) to thermolysin truncation using the procedure described example 5a will yield the product.

w3) Thermolysin truncation of SIAB-linked (17K, 34C) N-Met Aβ(1-42) oligomer (5w)

[0570] Subjecting SIAB-linked (17K, 34C) N-Met Aβ(1-42) oligomer (4w3) to thermolysin truncation using the procedure described example 5a will yield the product.

x) Thermolysin truncation of EDC/NHS-linked (17K, 34E) N-Met Aβ(1-42) oligomer (5x)

[0571] Subjecting EDC/NHS-linked (17K, 34E) N-Met Aβ(1-42) oligomer (4x) to thermolysin truncation using the procedure described example 5a will yield the product.

y) Thermolysin truncation of disulfide stabilized (17C, 34C) N-Met Aβ(1-42) oligomer (5y)

[0572] Disulfide stabilized (17C, 34C) N-Met Aβ(1-42) oligomer (4y) of example 4y was subjected to thermolysin truncation using the procedure described example 5a.

z) Thermolysin truncation of [(22C*, 29C*) Aβ(16-35)-amide, cyclised] oligomer (5z)

[0573] Subjecting [(22C*, 29C*) Aβ(16-35)-amide, cyclised] oligomer (3z) to thermolysin truncation using the procedure described example 5a will yield the product.

aa) Thermolysin truncation of disulfide stabilized (22C, 29C) Aβ(16-35)-amide oligomer (5aa)

[0574] Subjecting disulfide stabilized (22C, 29C) Aβ(16-35)-amide oligomer 22C, 29C) Aβ(16-35)-amide oligomer (4aa) to thermolysin truncation using the procedure described example 5a will yield the product.

ab) Thermolysin truncation of disulfide stabilized (F20->FA19501, 17C, 34C) N-Met Aβ(1-42) oligomer (5ab)

[0575] Subjecting disulfide stabilized (F20->FA19501, 17C, 34C) N-Met Aβ(1-42) oligomer (4ab) to thermolysin truncation using the procedure described example 5a will yield the product.

ac) Thermolysin truncation of disulfide stabilized (22C, 29C) Aβ(20-35) oligomer (5ac)

[0576] Subjecting disulfide stabilized (22C, 29C) Aβ(20-35) oligomer (4ac) to thermolysin truncation using the procedure described example 5a will yield the product.

ad) Thermolysin truncation of disulfide stabilized (22C, 29C) Aβ(20-42) oligomer (5ad)

[0577] Subjecting disulfide stabilized (22C, 29C) Aβ(20-42) oligomer (4ad) to thermolysin truncation using the procedure described example 5a will yield the product.

ae) Thermolysin truncation of disulfide stabilized (17C, 22C, 29C, 34C) Aβ(20-42) N-Met Aβ(1-42) oligomer (5ae)

[0578] Subjecting disulfide stabilized (17C, 22C, 29C, 34C) Aβ(20-42) N-Met Aβ(1-42) oligomer (4ae) to thermolysin truncation using the procedure described example 5a will yield the product.

af) Thermolysin truncation of disulfide stabilized (K28G29->FA12401, 17C, 34C) N-Met Aβ(1-42) oligomer (5af)

[0579] Subjecting disulfide stabilized (K28G29->FA12401, 17C, 34C) N-Met Aβ(1-42) oligomer (4af) to thermolysin truncation using the procedure described example 5a will yield the product.

### Biophysical and Biochemical Characterization

### Example 7

### SDS PAGE Analysis

[0580] a) SDS-PAGE (10-20% tricine gel) of (17C, 34C) N-Met Aβ(1-42) oligomer

[0581] SDS-PAGE was run using a 10-20% tricine gel, 1.0 mm, 15 well (Invitrogen, Cat # EC66255), employing 2-x tricine sample buffer (Invitrogen, Cat # LC1676) and tricine running buffer (Invitrogen, Cat # LC1675). Samples were mixed with equal parts sample buffer and loaded without heating. The gel was developed at ambient temperature for 100 minutes using a constant voltage of 125 V. After development, the gel was stained using a methanolacetic acid based Coomassie R-250 stain (0.1% Coomassie Brilliant Blue R250, 30% methanol, 10% acetic acid, in water), and destained using 30% methanol/10% acetic acid/water. Standards used: SeeBlue Plus2 Pre-Stained Standards (Invitrogen, Cat # LC5925), consisting of myosin (210 kDa), phosphorylase (98 kDa), BSA (78 kDa), Glutamic Dehydrogenase (55 kDa), Alcohol Dehydrogenase (45 kDa), Carbonic Anhydrase (34 kDa), Myoglobin Red (17 kDa), Lysozyme (16 kDa), Aprotinin (7 kDa) and Insulin (4 kDa).

[0582] (17C, 34C) N-Met Aβ(1-42) oligomer (2a) from example 2a showed the typical Aβ globulomer banding pattern (FIG. 2A).

b) SDS-PAGE (4-20% Tris/Glycine gel) of (xC, yC) N-Met-Aβ(1-42) oligomers SDS-PAGE was run using the following parameters:
[0583] SDS-sample buffer:
   [0584] 0.3 g SDS
   [0585] 4 mL 1 M Tris/HCl pH 6.8
   [0586] 8 mL glycerol
   [0587] 70 μL 1% bromphenolblue in ethanol
   [0588] add H₂O to 50 mL
[0589] Running buffer:
   [0590] 7.5 g Tris
   [0591] 36 g Glycine
   [0592] 2.5 g SDS
   [0593] add H₂O to 2.5 L
[0594] SDS-PAGE gel system:
   [0595] 4-20% Tris/Glycine Gel: (Invitrogen Inc., Cat. no.: EC60255BOX)

[0596] 10 μL (xC, yC) N-Met-Aβ(1-42) oligomer or Aβ(1-42) globulomer preparation before and after the thermolysin digestion were added to 10 μL SDS-sample buffer. The resulting 20 μL sample are loaded onto a 4-20% Tris/Glycin Gel (Invitrogen Inc., Cat. no.: EC60255BOX). The SDS-PAGE is conducted at a constant current of 25 mA.
[0597] Coomassie Staining:
[0598] Staining solution:
   [0599] 2500 ml Methanol
   [0600] 500 ml Acetic acid
   [0601] 5 g Coomassie Brillant Blue R250, Fa. Bio-Rad, Cat. no. 161-0400
   [0602] 2000 ml H₂O
[0603] Destaining solution:
   [0604] 875 ml Methanol
   [0605] 250 ml Acetic acid
   [0606] 3925 ml H₂O

[0607] Subsequent to electrophoresis the gel was incubated in staining solution for 30 min at room temperature under shaking on a rocking platform. After staining the background of the gel was destained over night at room temperature in the destaining solution.

[0608] (14C, 37C) N-Met Aβ(1-42) oligomer from example 4a, thermolysin truncated (14C, 37C)N-Met Aβ(1-42) oligomer from example 5a, (15C, 36C) N-Met Aβ(1-42) oligomer from example 4b, thermolysin truncated (15C, 36C) N-Met Aβ(1-42) oligomer from example 5b, (16C, 35C) N-Met Aβ(1-42) oligomer from example 4c, thermolysin truncated (16C, 35C) N-Met Aβ(1-42) oligomer from example 5c, (17C, 34C) N-Met Aβ(1-42) oligomer from example 4d, thermolysin truncated (17C, 34C) N-Met Aβ(1-42) oligomer from example 5d, (18C, 33C)N-Met Aβ(1-42) oligomer from example 4e, and thermolysin truncated (18C, 33C) N-Met Aβ(1-42) oligomer from example 5e (FIG. 2B) as well as (19C, 32C) N-Met Aβ(1-42) oligomer from example 4f, thermolysin truncated (19C, 32C) N-Met Aβ(1-42) oligomer from example 5f, (20C, 31C) N-Met Aβ(1-42) oligomer from example 4g, thermolysin truncated (20C, 31C) N-Met Aβ(1-42) oligomer from example 5g, (21C, 30C) N-Met Aβ(1-42) oligomer from example 4h, thermolysin truncated (21C, 30C) N-Met Aβ(1-42) oligomer from example 5h, (22C, 29C) N-Met Aβ(1-42) oligomer from example 31, and thermolysin truncated (22C, 29C) N-Met Aβ(1-42) oligomer from example 5h (FIG. 2C) showed the typical Aβ globulomer banding pattern of Aβ(1-42) globulomer or Aβ(1-42) thermolysin truncated globulomer (although there are some apparent shifts of band height at which the (YC, YC) N-Met Aβ(1-42) oligomers and thermolysin truncated (YC, YC) N-Met Aβ(1-42) oligomers run).

[0609] Further, (17K, 34E) N-Met Aβ(1-42) oligomer (0.2% SDS) from example 3x, (17K, 34E) N-Met Aβ(1-42) oligomer (0.05% SDS) from example 3x, (17C(ACM), 34C(ACM)) Aβ(16-35) oligomer (0.2% SDS) from example 3u, (17C(ACM), 34C(ACM)) Aβ(16-35) oligomer (0.05% SDS) from example 3u, (17K, 34C) N-Met Aβ(1-42) oligomer (0.2% SDS) from example 3w, (17K, 34C) N-Met Aβ(1-42) oligomer (0.05% SDS) from example 3w, (17C, 34C) Aβ(16-42) oligomer (0.2% SDS) from example 3s, (17C, 34C) Aβ(16-42) oligomer (0.05% SDS) from example 3s, (17KC, 34C) Aβ(13-42) oligomer (0.2% SDS) from example 3r, and (17KC, 34C) Aβ(13-42) oligomer (0.05% SDS) from example 3r (FIG. 2D) showed the typical Aβ globulomer banding pattern of N-Met Aβ(1-42) globulomer.

### Example 8

### Direct ELISA

[0610] The immunoreactivity of (17C, 34C) N-Met Aβ(1-42) oligomer (2a) from example 2a was further characterized by using an antibody that is >1000 fold selective for the Aβ(1-42) globulomer form over fibril and free peptide (monoclonal antibody 5F7).

[0611] Materials: Microtiterplates were Nunc Immuno Plate, Maxi-Sorb Surface, flat bottom, (Catalogue #439454). The conjugate (secondary antibody) was Donkey anti-mouse HRPO conjugate, Jackson Immuno Research, (Catalogue #715-035-150). The HRPO Substrate was 3,3′,5′5′-Tetramethylbenzidine Liquid substrate (TMB), Sigma, (Catalogue #T4444). Non-fat Dry Milk (NFDM), was from BioRad, (Catalogue #170-6404). All other chemicals were from conventional sources.

[0612] Buffers and solutions: PBST buffer: Sigma PBS made with 0.05% Tween 20. PBST with 0.5% BSA was made by dissolving 0.5 mg BSA in 100 mL PBST. Blocking solution was 3% NFDM in PBST. Conjugate diluent was 1% NFDM in PBST. The coating buffer was 100 mM NaHCO₃ pH8.2. The HRPO Stop Solution was 2 M H₂SO₄.

[0613] Coating the plates: The Aβ globulomer to be tested was diluted to 1.0 μg/mL in coating buffer. 100 μL were added to each well to be coated. Plate was sealed with sealing film and left at 4° C. overnight.

[0614] Plate Blocking: The coating solution was removed from the wells. Each well was optionally washed 2-3× with 150 μL of PBST. 300 μL of blocking solution were added (3% NFDM in PBST). Plate was covered with plate sealing film and incubated for ˜2 hrs at room temperature, with agitation.

[0615] Primary Antibody: The blocking solution was removed from the wells. Each well was optionally washed 2-3× with 150 μL of PBST. 100 μL of primary antibody solutions were added. For the full length N-Met Aβ(1-42) globulomer, solutions of 0.04 to 100 μg/mL of antibody 5F7 were used. The antibody was diluted using PBST with 0.5% BSA. The plate was covered with plate sealing film and incubated for ˜2 to 3 hrs at room temperature with agitation.

[0616] Secondary Antibody (HRPO Conjugate): The primary antibody solution was removed from the wells. Each well was washed 2-3× with 150 μL of PBST. 200 μL of secondary antibody (HRPO conjugate) solution diluted 1:5000 in PBST with 1% NFDM were added. The plate was covered with plate sealing film and incubated for ˜1 hr at room temperature with agitation.

[0617] Substrate Development: The conjugate solution was removed from the wells. Each well was washed 2-3× with 200 μL of PBST. 100 μL of HRPO substrate solution were added to each well. Color was allowed to develop under observation. It turned blue. The reaction was usually done in 5-10 minutes at room temperature. 50 μL of stop solution were added to each well. The blue color turned yellow. Absorbance at 450 nm was read using a microtiterplate reader within 30 min of addition of the stop solution.

[0618] The binding of the globulomer-specific monoclonal antibody 5F7 to N-Met Aβ(1-42) globulomer and (L17C, L34C) N-Met Aβ(1-42) mutant oligomer to the 5F7 are almost identical (FIG. 3A) indicating that the (L17C, L34C) N-Met Aβ(1-42) mutant oligomer still displays the globulomer-specific epitope.

[0619] A comparison of direct ELISA results comparing the apparent binding affinity of the globulomer-specific mAb 5F7 to disulfide stabilized (17C, 34C) N-Met Aβ(1-42) oligomer from example 4y vs. the same oligomer truncated at residue 20 by enzymatic cleavage with thermolysin from example 5y is shown in FIG. 3B.

[0620] A comparison of direct ELISA results comparing the apparent binding affinity of the globulomer-specific mAb 7C6 to disulfide stabilized (17C, 34C) N-Met Aβ(1-42) oligomer from example 4y vs. the same oligomer truncated at residue 20 by enzymatic cleavage with thermolysin from example 5y is shown in FIG. 3C.

[0621] A comparison of direct ELISA results comparing the apparent binding affinity of the globulomer-specific rabbit polyclonal antiserum 5599 to disulfide stabilized (17C, 34C) N-Met Aβ(1-42) oligomer from example 4y vs. the same oligomer truncated at residue 20 by enzymatic cleavage with thermolysin from example 5y is shown in FIG. 3D.

[0622] A comparison of direct ELISA results comparing the apparent binding affinity of the globulomer-specific mAb 5F7 to disulfide stabilized (17C, 34C) Aβ(16-35) oligomer from example 4p vs. the same oligomer truncated at residue 20 by enzymatic cleavage with thermolysin from example 5p is shown in FIG. 3E.

[0623] A comparison of direct ELISA results comparing the apparent binding affinity of the globulomer-specific mAb 7C6 to disulfide stabilized (17C, 34C) Aβ(16-35) oligomer from example 4p vs. the same oligomer truncated at residue 20 by enzymatic cleavage with thermolysin from example 5p is shown in FIG. 3F.

[0624] A comparison of direct ELISA results comparing the apparent binding affinity of the globulomer-specific rabbit polyclonal antiserum 5599 to disulfide stabilized (17C, 34C) Aβ(16-35) oligomer from example 4p vs. the same oligomer truncated at residue 20 by enzymatic cleavage with thermolysin from example 5p is shown in FIG. 3G.

[0625] A comparison of direct ELISA results comparing the apparent binding affinity of the globulomer-specific mAb 5F7 to Aβ(16-35) oligomer from example 4m vs. the same oligomer truncated at residue 20 by enzymatic cleavage with thermolysin from example 5m is shown in FIG. 3H.

[0626] A comparison of direct ELISA results comparing the apparent binding affinity of the globulomer-specific mAb 7C6 to Aβ(16-35) oligomer from example 4m vs. the same oligomer truncated at residue 20 by enzymatic cleavage with thermolysin from example 5m is shown in FIG. 3I.

[0627] A comparison of direct ELISA results comparing the apparent binding affinity of the globulomer-specific rabbit polyclonal antiserum 5599 to Aβ(16-35) oligomer from example 4m vs. the same oligomer truncated at residue 20 by enzymatic cleavage with thermolysin from example 5m is shown in FIG. 3J.

[0628] A comparison of direct ELISA results comparing the apparent binding affinity of the globulomer-specific mAb 5F7 to (17C(ACM), 34C(ACM)) Aβ(16-35) oligomer from example 4l vs. the same oligomer truncated at residue 20 by enzymatic cleavage with thermolysin from example 51 is shown in FIG. 3K.

[0629] A comparison of direct ELISA results comparing the apparent binding affinity of the globulomer-specific mAb 7C6 to (17C(ACM), 34C(ACM)) Aβ(16-35) oligomer from example 4l vs. the same oligomer truncated at residue 20 by enzymatic cleavage with thermolysin from example 51 is shown in FIG. 3L.

[0630] A comparison of direct ELISA results comparing the apparent binding affinity of the globulomer-specific rabbit polyclonal antiserum 5599 to (17C(ACM), 34C(ACM)) Aβ(16-35) oligomer from example 41 vs. the same oligomer truncated at residue 20 by enzymatic cleavage with thermolysin from example 51 is shown in FIG. 3M.

[0631] A comparison of direct ELISA results comparing the apparent binding affinity of the globulomer-specific mAb 5F7 to disulfide stabilized (17C, 34C) Aβ(16-35) oligomer (cyclised before oligomer formation) from example 4o vs. the same oligomer truncated at residue 20 by enzymatic cleavage with thermolysin from example 5o is shown in FIG. 3N.

[0632] A comparison of direct ELISA results comparing the apparent binding affinity of the globulomer-specific mAb 7C6 to disulfide stabilized (17C, 34C) Aβ(16-35) oligomer (cyclised before oligomer formation) from example 4o vs. the same oligomer truncated at residue 20 by enzymatic cleavage with thermolysin from example 5o is shown in FIG. 3O;

[0633] A comparison of direct ELISA results comparing the apparent binding affinity of the globulomer-specific rabbit polyclonal antiserum 5599 to disulfide stabilized (17C, 34C) Aβ(16-35) oligomer (cyclised before oligomer formation) from example 4o vs. the same oligomer truncated at residue 20 by enzymatic cleavage with thermolysin from example 5o is shown in FIG. 3P;

[0634] A comparison of direct ELISA results comparing the apparent binding affinity of the globulomer-specific mAb 5F7 to disulfide stabilized (17C, 34C) Aβ(16-35) oligomer (cyclised before oligomer formation) from example 4o vs. disulfide stabilized (17C, 34C) Aβ(16-42), (17C, 34C) Aβ(16-35) and (17C, 34C) N-Met Aβ(1-42) oligomer (all cyclised after oligomer formation) from examples 4s, 4p and 4y is shown in FIG. 3Q.

[0635] A comparison of direct ELISA results comparing the apparent binding affinity of the globulomer-specific mAb 5F7 to thermolysin truncated disulfide stabilized (17C, 34C) Aβ(16-35) oligomer (cyclised before oligomer formation) from example 5o vs. thermolysin truncated disulfide stabilized (17C, 34C) Aβ(16-42), (17C, 34C) Aβ(16-35) and (17C, 34C) N-Met Aβ(1-42) oligomer (all cyclised after oligomer formation) from examples 5s, 5p and 5y is shown in FIG. 3R.

[0636] A comparison of direct ELISA results comparing the apparent binding affinity of the globulomer-specific mAb 5F7 to disulfide stabilized (17C, 34C) Aβ(16-42) oligomer from example 4s vs. the same oligomer truncated at residue 20 by enzymatic cleavage with thermolysin from example 5s is shown in FIG. 3S.

[0637] A comparison of direct ELISA results comparing the apparent binding affinity of the globulomer-specific mAb 7C6 to disulfide stabilized (17C, 34C) Aβ(16-42) oligomer from example 4s vs. the same oligomer truncated at residue 20 by enzymatic cleavage with thermolysin from example 5s is shown in FIG. 3T.

[0638] A comparison of direct ELISA results comparing the apparent binding affinity of the globulomer-specific rabbit polyclonal antiserum 5599 to disulfide stabilized (17C, 34C) Aβ(16-42) oligomer from example 4s vs. the same oligomer truncated at residue 20 by enzymatic cleavage with thermolysin from example 5s is shown in FIG. 3U.

[0639] A comparison of direct ELISA results comparing the apparent binding affinity of the globulomer-specific mAb 5F7 to disulfide stabilized (17C, 34C) Aβ(12-42) oligomer from example 4k vs. the same oligomer truncated at residue 20 by enzymatic cleavage with thermolysin from example 5k is shown in FIG. 3V.

[0640] A comparison of direct ELISA results comparing the apparent binding affinity of the globulomer-specific mAb 7C6 to disulfide stabilized (17C, 34C) Aβ(12-42) oligomer from example 4k vs. the same oligomer truncated at residue 20 by enzymatic cleavage with thermolysin from example 5k is shown in FIG. 3W.

[0641] A comparison of direct ELISA results comparing the apparent binding affinity of the globulomer-specific rabbit polyclonal antiserum 5599 to disulfide stabilized (17C, 34C) Aβ(12-42) oligomer from example 4k vs. the same oligomer truncated at residue 20 by enzymatic cleavage with thermolysin from example 5k is shown in FIG. 3X.

[0642] Direct ELISA results of the apparent binding affinity of the globulomer-specific mAb 5F7 to disulfide stabilized (17KC, 34C) Aβ(13-42) oligomer from example 4r are shown in FIG. 3Y.

[0643] Direct ELISA results of the apparent binding affinity of the globulomer-specific mAb 7C6 to disulfide stabilized (17KC, 34C) Aβ(13-42) oligomer from example 4r are shown in FIG. 3Z.

[0644] Direct ELISA results of the apparent binding affinity of the globulomer-specific rabbit polyclonal antiserum 5599 to disulfide stabilized (17KC, 34C) Aβ(13-42) oligomer from example 4r are shown in FIG. 3AA.

[0645] FIG. 13 shows a comparison of direct Elisa response of (17K, 34C) N-Met Aβ(1-42) oligomer without cross-link from example 3w with disulfide-stabilized (17C, 34C) N-Met Aβ(1-42) oligomer from example 4y to (A) the globulomer-specific monoclonal antibody 5F7; (B) the globulomer-specific monoclonal antibody 7C6; and (C) the globulomer-specific rabbit polyclonal antiserum 5599.

[0646] FIG. 14 shows (A) a comparison of direct Elisa response of (17K, 34C) N-Met Aβ(1-42) oligomer without cross-link from example 3w with (17K, 34C) N-Met Aβ(1-42) oligomer cross-linked with SMCC before (from example 4w1) and after (from example 5w1)thermolysin truncation to (A) the globulomer-specific monoclonal antibody 5F7; (B) the globulomer-specific monoclonal antibody 7C6; and (C) the globulomer-specific rabbit polyclonal antiserum 5599.

[0647] FIG. 15 shows (A) a comparison of direct Elisa response of (17K, 34C) N-Met Aβ(1-42) oligomer without cross-link from example 3w with (17K, 34C) N-Met Aβ(1-42) oligomer cross-linked with MBS before (from example 4w2) and after (from example 5w2) thermolysin truncation to (A) the globulomer-specific monoclonal antibody 5F7; (B) the globulomer-specific monoclonal antibody 7C6; and (C) the globulomer-specific rabbit polyclonal antiserum 5599.

[0648] FIG. 16 shows (A) a comparison of direct Elisa response of (17K, 34C) N-Met Aβ(1-42) oligomer without cross-link from example 3w with (17K, 34C) N-Met Aβ(1-42) oligomer cross-linked with SIAB before (from example 4w3) and after (from example 5w3) thermolysin truncation to (A) the globulomer-specific monoclonal antibody 5F7; (B) the globulomer-specific monoclonal antibody 7C6; and (C) the globulomer-specific rabbit polyclonal antiserum 5599.

[0649] FIG. 17 shows (A) a comparison of direct Elisa response of (17K, 34E) N-Met Aβ(1-42) oligomer from example 3x without cross-link with disulfide-stabilized (17C, 34C) N-Met Aβ(1-42) oligomer from example 3y to (A) the globulomer-specific monoclonal antibody 5F7; (B) the globulomer-specific monoclonal antibody 7C6; and (C) the globulomer-specific rabbit polyclonal antiserum 5599.

[0650] FIG. 18 shows (A) a comparison of direct Elisa response of (17K, 34C) N-Met Aβ(1-42) oligomer without cross-link with (17K, 34C) N-Met Aβ(1-42) oligomer cross-linked with EDC/NHS before and after thermolysin truncation to (A) the globulomer-specific monoclonal antibody 5F7; (B) the globulomer-specific monoclonal antibody 7C6; and (C) the globulomer-specific rabbit polyclonal antiserum 5599.

[0651] Some of the results obtained are:

The (17C, 34C) Aβ(16-42) peptide (example 3s) was shown to form oligomers (example 4s) that both contained the expected disulfide bond (FIGS. 4E & F) and displayed the globulomer epitope (FIGS. 3S-3U). Upon truncation with thermolysin (example 5s), the expected increase in affinity to the globulomer-specific antibodies was observed (FIG. 3S-3U).

[0652] The (17C, 34C) Aβ(12-42) peptide (example 3k) was shown to form oligomers (example 4k) that both contained the expected disulfide bond (FIGS. 4G & 4H) and displayed the globulomer epitope (FIGS. 3V-3X). Upon truncation with thermolysin (example 5k), the expected increase in affinity to the globulomer-specific antibodies was observed (FIGS. 3V-3X).

[0653] The (17C, 34C) Aβ(16-35) peptide (example 3o) was shown to form oligomers (example 4o) that both contained the expected disulfide bond (FIGS. 4C & D) and displayed the globulomer epitope (FIGS. 3E-3G). Upon truncation with thermolysin (example 5o), the expected increase in affinity to the globulomer-specific antibodies was observed (FIGS. 3E-G). However, Aβ(16-35) peptides that are precluded from forming this disulfide linkage, either through lack of cys residues (wt Aβ(16-35), example 3m), or ACM protection of the —SH of the cys residue ((17C ACM/34C ACM) Aβ(16-35), example 31), were not able to form oligomers that displayed the globulomer epitope (FIGS. 3H-3M).

[0654] By introducing a lysine at position 17 and a cysteine at position 34, a variety of heterobifunctional cross-linking reagents can be employed for a bridge between the side-chains of these two residues, including sulfo-SMCC, sulfo-MBS, and sulfo-SIAB. For instance, the (17K, 34C) N-Met Aβ(1-42) peptide (example 3w) can form oligomers that display the globulomer epitope (FIGS. 13A-13C). Moreover, these oligomers can be subjected to cross-linking using sulfo-SMCC (example 4w1), sulfo-MBS (example 4w2), and sulfo-SIAB (example 4w3), and the desired intro-molecular covalent cross-link formed (FIGS. 12A-12C). These cross-linked AR oligomers still display the appropriate reactivity to the globulomer-specific antibodies (FIGS. 14A-14C, 15A-15C, and 16A-16C, respectively). Furthermore, these AR oligomers can be subjected to thermolysin truncation (examples 4w1, 4w2, & 4w3), with the expected increase in affinity to the globulomer-specific antibodies resulting (FIGS. 14A-14C, 15A-15C, and 16A-16C).

[0655] By introducing a lysine at position 17 and a glutamic acid at position 34, a variety of cross-linking strategies can be employed to for a bridge between the side-chains of these two residues, including activation of the glutamate side chain by reaction with EDC, followed by sulfo-NHS. This activated side chain can subsequently react with primary amine of the lysine residue introduced at position 17. For instance, the (17K, 34E) N-Met Aβ(1-42) peptide (example 3x) can form oligomers that display the globulomer epitope (FIGS. 17A-17C). Moreover, these oligomers can be subjected to cross-linking using EDC and sulfo-NHS, with intra-molecular covalent cross-links resulting (FIG. 12D). These cross-linked AR oligomers still display the appropriate reactivity to the globulomer-specific antibodies (FIGS. 18A-18C). Furthermore, these AR oligomers can be subjected to thermolysin truncation (examples 4x), with the expected increase in affinity to the globulomer-specific antibodies resulting (FIGS. 18A-18C).

### Example 9

### Mass Spectroscopy

[0656] Mass spectrometry of the (17C, 34C) N-Met AN-Met Aβ(1-42) oligomer (2a) from example 2a confirmed that formation of oligomers with the (L17C, L34C) N-Met Aβ(1-42) mutant peptide (1a) of example 1a directed the efficient formation of intra-peptide disulfide bonds between the two Cys residues (FIG. 4A). The mass centered around 4622 Da, the expected mass for the (L17C, L34C) N-Met Aβ(1-42) mutant peptide, with a single disulfide bond formed. No sign of covalent dimer peptide was observed in the mass spectrum. After reduction with dithiothreitol (DTT), the mass centered around 4624 Da, as expected for the (L17C, L34C) N-Met Aβ(1-42) mutant peptide with no single disulfide bond, and each mass observed in the isotopic deconvolution gains two Da, as expected from the reduction of a disulfide bond (FIG. 4B).

[0657] Mass spectrometry of the (17C, 34C) Aβ(16-35) oligomer (3p) from example 3p confirmed that formation of oligomers with the (17C, 34C) Aβ(16-35) peptide (1p) of example 1p directed the efficient formation of intra-peptide disulfide bonds between the two Cys residues (FIG. 4C). The mass centered around 2085 Da, the expected mass for the (17C, 34C) Aβ(16-35) peptide, with a single disulfide bond formed. No sign of covalent dimer peptide was observed in the mass spectrum. After reduction with dithiothreitol (DTT), the mass centered around 2086 Da, as expected for the (17C, 34C) Aβ(16-35) peptide with no single disulfide bond, and each mass observed in the isotopic deconvolution gains one to two Da, as expected from the reduction of a disulfide bond (FIG. 4D).

[0658] Mass spectrometry of the (17C, 34C) Aβ(16-42) oligomer (3s) from example 3s confirmed that formation of oligomers with the (17C, 34C) Aβ(16-42) peptide (1s) of example 1s directed the efficient formation of intra-peptide disulfide bonds between the two Cys residues (FIG. 4E). The mass centered around 2683 Da, the expected mass for the (17C, 34C) Aβ(16-35) peptide, with a single disulfide bond formed. No sign of covalent dimer peptide was observed in the mass spectrum. After reduction with dithiothreitol (DTT), the mass centered around 2684 Da, as expected for the (17C, 34C) Aβ(16-42) peptide with no single disulfide bond, and each mass observed in the isotopic deconvolution gains one to two Da, as expected from the reduction of a disulfide bond (FIG. 4F).

[0659] Mass spectrometry of the (17C, 34C) Aβ(12-42) oligomer (3k) from example 3k confirmed that formation of oligomers with the (17C, 34C) Aβ(12-42) peptide (1k) of example 1k directed the efficient formation of intra-peptide disulfide bonds between the two Cys residues (FIG. 4G). No sign of covalent dimer peptide was observed in the mass spectrum. After reduction with dithiothreitol (DTT), the mass centered around 3186 Da, as expected for the (17C, 34C) Aβ(12-42) peptide with no single disulfide bond, and each mass observed in the isotopic deconvolution gains one to two Da, as expected from the reduction of a disulfide bond (FIG. 4H).

[0660] Mass spectrometry (ESI) of the (17KC, 34C) Aβ(13-42) oligomer (3r) from example 3r confirmed that formation of oligomers with the (17KC, 34C) Aβ(13-42) peptide (1r) of example 1r directed the efficient formation of intra-peptide disulfide bonds between the two Cys residues (FIG. 4I). While significant amounts of covalent dimer peptide were observed in the mass spectrum (data not shown), the desired intra-molecular disulfide bond is evident. After reduction with dithiothreitol (DTT), the mass centered around 3215 Da, as expected for the (17KC, 34C) Aβ(13-42) peptide with no single disulfide bond, and each mass observed in the iso-topic deconvolution gains one to two Da, as expected from the reduction of a disulfide bond (FIG. 4J).

[0661] The peptide masses of the (xC, yC) N-Met Aβ(1-42) oligomers before (from examples 4a-4j) and after (from examples 5a-5j) thermolysin digestion as detected by SELDI-MS are indicated in FIG. 6.

[0662] The mass spectrum (ESI) of oligomers made with (17K, 34C) N-Met Aβ(1-42) peptide after cross-linking reaction with the heterobifunctional cross-linking reagent sulfo-SMCC from example 4w1 is shown in FIG. 12A. The predominant species appears to be the desired product.

[0663] The mass spectrum (MALDI) of globulomers made with (17K, 34C) N-Met Aβ(1-42) peptide after cross-linking reaction with the heterobifunctional cross-linking reagent sulfo-MBS from example 4w2 is shown in FIG. 12B. There is evidence for the desired cross-link to have formed (4852 Da), however masses that correspond to addition of the MBS followed by hydrolysis of the maleimide (4869 Da), addition of two MBS adducts followed by hydrolysis (5088 Da), and unreacted peptide (4652 Da) are also observed.

[0664] The mass spectrum (ESI) of globulomers made with (17K, 34C) N-Met Aβ(1-42) peptide after cross-linking reaction with the heterobifunctional cross-linking reagent sulfo-SIAB from example 4w3 is shown in FIG. 12C. The arrow indicates the expected mass after the desired cross-link forms (mw=4810 Da).

[0665] The mass spectrum (MALDI) of globulomers made with (17K, 34E) N-Met Aβ(1-42) peptide after cross-linking reaction with the heterobifunctional cross-linking reagent EDC and NHS from example 4x is shown in FIG. 12D. The arrows indicate masses that suggest two cross-links (mw=4637 Da), and three cross-links (mw=4620 Da) have formed.

### Example 10

### Hydrodynamic Analysis

[0666] Samples were loaded into standard two-sector cells using sapphire windows. All samples were examined using either a 4-hole or an 8-hole rotor.

[0667] Conditions were as follows: temperature: 20° C., rotor speed: 42,000 rpm, interference data was collected, absorbance data was collected at 280 nm in continuous mode with a radial step size of 0.003 cm. One data point was collected per step (no signal averaging). Typically, 200 scans or less were collected over the course of no more than 9 hrs.

[0668] A continuous S distribution analysis (C(s) analysis) was done as implemented in Sedfit v8.9 (P. Schuck (2000), “Size distribution analysis of macromolecules by sedimentation velocity ultracentrifugation and Lamm equation modeling”, Biophysical Journal 78:1606-1619) to understand the overall heterogeneity of the samples. Both radial and time independent noise were fit and removed from the data using a maximal entropy algorithm.

[0669] The sedimentation velocity experiments showed that both N-Met Aβ(1-42) globulomer and the (L17C, L34C) N-Met Aβ(1-42) mutant oligomer (2a) from example 2a formed homogeneous oligomers (FIG. 5A). However, (L17C, L34C) N-Met Aβ(1-42) mutant oligomer displayed better hydrodynamic properties.

[0670] The sedimentation velocity experiments also showed that both N-Met Aβ(1-42) truncated globulomer and the thermolysin truncated (L17C, L34C) N-Met Aβ(1-42) oligomer (5y) from example 5y formed homogeneous oligomers (FIGS. 5B and C). However, thermolysin truncated (L17C, L34C) N-Met Aβ(1-42) oligomer displayed better hydrodynamic properties.

[0671] Introduction of a disulfide bond in the N-Met (17C/34C) Aβ(1-42) oligomer (example 4y) does stabilize further aggregation relative to wt N-Met Aβ(1-42) oligomer, in 5 mM Na—PO₄, 35 mM NaCl, pH 7.4 (FIG. 5A). Moreover, the disulfide stabilized (17C/34C) N-Met Aβ (1-42) oligomer remains significantly more hydrodynamically homogeneous after truncation at residue 20 by thermolysin (example 5y), relative to the wt N-Met Aβ(1-42) oligomer. This is evident both in the presence (FIG. 5B) and absence (FIG. 5C) of 0.05% SDS. In fact, after thermolysin treatment of the wt N-Met Aβ(1-42) oligomer results in a preparation that is too heterogeneous to be examined in the absence of 0.05% SDS (data not shown).

### Example 11

### Iodoacetamide Alkylation of Thermolysin Truncated (xC, yC) N-Met Aβ(1-42) Oligomers and SELDI-MS Analysis

### A: Thermolysin Truncated (xC, yC) N-Met Aβ(1-42) Oligomers and N-Met Aβ(1-42) Globulomers Used for Alkylation:

[0672] The following thermolysin truncated oligomers and globulomers were subjected to iodoacetamide alkylation
1) Thermolysin truncated (14C, 37C) N-Met Aβ(1-42) oligomer of example 5a
2) Thermolysin truncated (15C, 36C) N-Met Aβ(1-42) oligomer of example 5b
3) Thermolysin truncated (16C, 35C) N-Met Aβ(1-42) oligomer of example 5c
4) Thermolysin truncated (17C, 34C) N-Met Aβ(1-42) oligomer of example 5d
5) Thermolysin truncated (18C, 33C) N-Met Aβ(1-42) oligomer of example 5e
6) Thermolysin truncated (19C, 32C) N-Met Aβ(1-42) oligomer of example 5f
7) Thermolysin truncated (20C, 31C) N-Met Aβ(1-42) oligomer of example 5g
8) Thermolysin truncated (21C, 30C) N-Met Aβ(1-42) oligomer of example 5h
9) Thermolysin truncated (22C, 29C) N-Met Aβ(1-42) oligomer of example 5i
10) Aβ(1-42) thermolysin truncated globulomer of example 5j

### B: Iodoacetamide Alkylation

### B1: Control Samples

[0673] 2.5 μl of the thermolysin truncated oligomer or globulomer were diluted with 5 μl 50 mM Tris/HCl, 1 mM EDTA, pH 8.6 (5 min Helium aerated)
[0674] 20 min incubation at 37° C.
[0675] 2 μl H₂O were added
[0676] 1 h incubation at room temperature
[0677] 115 μl 50% CH₃CN, 0.5% TFA were added

### B2: Iodoacetamide Alkylation Samples

[0678] 2.5 μl of the thermolysin truncated oligomer or globulomer were diluted with 5 μl 50 mM Tris/HCl, 1 mM EDTA, pH 8.6 (Helium aerated)
[0679] 20 min incubation at 37° C.
[0680] 2 μl 100 mM iodoactamide (Sigma; Cat. no. 11149) solution in H₂O were added
[0681] 1 h incubation at room temperature
[0682] 115 μl 50% CH₃CN, 0.5% TFA were added

### B3: DTT Reduction Followed by Iodoacetamide Alkylation Samples

[0683] 2.5 μl of the thermolysin truncated oligomer or globulomer were diluted with 5 μl 50 mM Tris/HCl, 1 mM EDTA, 2 mM DTT, pH 8.6 (Helium aerated)
[0684] 20 min incubation at 37° C.
[0685] 2 μl 100 mM Iodoactamide (Sigma; Cat. no. 11149) solution in H₂O were added
[0686] 1 h incubation at room temperature
[0687] 115 μl 50% CH₃CN, 0.5% TFA were added

### C: Surface-Enhanced Laser Desorption Ionization-Mass Spectrometry (SELDI-MS) Quantification of Immunoprecipitated Aβ(20-42) Peptide

[0688] 2 μL sample was spotted onto a H4 Protein Chip Array (BioRad; Cat. no. C573-0028).
[0689] The spots were allowed to dry on a warm incubator plate.
[0690] CHCA-solution:
   [0691] 5 mg CHCA were dissolved in 150 μL acetonitrile+150 μL 1% TFA=stock solution; stored at −20° C.
   [0692] Of the stock solution 10 μL were diluted with 20 μL acetonitrile and 20 μL 1% TFA=working CHCA-solution.
   [0693] 2 μL of the working CHCA-solution was applied onto the spots
[0694] The spots were allowed to dry on a warm incubator plate and analyzed by SELDI-MS (Surface-Enhanced Laser Desorption Ionization-Mass Spectrometry; BioRad, Protein chip SELDI system enterprise edition)).
   [0695] Conditions: mass range: 800 to 10000 Da; focus mass: 2220 Da; matrix attenuation: 500 Da; sampling rate: 400 MHz; warming shots: 2 with energy: 1100 nj; data shots: 10 with energy 1000 nJoule; Partition 1 of 3.
   [0696] Analysis: the peak intensity of the respective double alkylated (2×CM), alkylated (1×CM) or non-alkylated (0×CM) peptide mass peaks were detected.

[0697] The results are shown in FIG. 7.

[0698] In the absence of DTT as reducing agent iodoacetamide can not alkylate the —SH group of cysteine if this has formed a covalent S—S bridge, the cystine, with another cysteine. Hence, absence of iodoacetamide alkylation reaction (as indicated by 0×CM in FIG. 7) of (xC, yC) N-Met-Aβ(1-42) oligomer after thermolysin treatment analyzed by SELDI-MS shows S—S formation has occurred in (xC, yC) N-Met-Aβ(1-42) oligomer. That iodoacetamide alkylation reaction can in principle occur was verified under reducing conditions using DTT to destroy S—S and generate free —SH groups which then were found to be amenable for iodoacetamide alkylation (FIG. 7).

### Example 12

### Dot Blot Analysis of (xC, yC) N-Met Aβ(1-42) Oligomers and Aβ(1-42) Globulomers Before and After Thermolysin Truncation

### Method:

### Aβ Standards for Dot Blot:

[0699] 1. (14C, 37C) N-Met Aβ(1-42) oligomer of example 4a
2. Thermolysin truncated (14C, 37C) N-Met Aβ(1-42) oligomer of example 5a
3. (15C, 36C) N-Met Aβ(1-42) oligomer of example 4b
4. Thermolysin truncated (15C, 36C) N-Met Aβ(1-42) oligomer of example 5b
5. (16C, 35C) N-Met Aβ(1-42) oligomer of example 4c
6. Thermolysin truncated (16C, 35C) N-Met Aβ(1-42) oligomer of example 5c
7. (17C, 34C) N-Met Aβ(1-42) oligomer of example 4d
8) Thermolysin truncated (17C, 34C) N-Met Aβ(1-42) oligomer of example 5d
9. (18C, 33C) N-Met Aβ(1-42) oligomer of example 4e
10. Thermolysin truncated (18C, 33C) N-Met Aβ(1-42) oligomer of example 5e
11. (19C, 32C) N-Met Aβ(1-42) oligomer of example 4f
12. Thermolysin truncated (19C, 32C) N-Met Aβ(1-42) oligomer of example 5f
13. (20C, 31C) N-Met Aβ(1-42) oligomer of example 4g
14. Thermolysin truncated (20C, 31C) N-Met Aβ(1-42) oligomer of example 5g
15. (21C, 30C) N-Met Aβ(1-42) oligomer of example 4h
16. Thermolysin truncated (21C, 30C) N-Met Aβ(1-42) oligomer of example 5h
17. (22C, 29C) N-Met Aβ(1-42) oligomer of example 4i
18. Thermolysin truncated (22C, 29C) N-Met Aβ(1-42) oligomer of example 5i
19. Aβ(1-42) globulomer of example 4j
20. Aβ(1-42) thermolysin truncated globulomer of example 5j

### Materials for Dot Blot:

### Aβ Standards:

[0700] Serial dilution of Aβ antigens in columns 1-20 in 20 mM NaH₂PO₄, 140 mM NaCl, pH 7.4+0.2 mg/ml BSA
   [0701] 1) 10 pmol/μl
   [0702] 2) 1 pmol/μl
   [0703] 3) 0.1 pmol/μl
   [0704] 4) 0.01 pmol/μl
   [0705] 5) 0.001 pmol/μl

### Nitrocellulose:

[0706] Trans-Blot Transfer medium, Pure Nitrocellulose Membrane (0.45 μm); BioRad

### Anti-Mouse-AP:

[0707] AP326A (Chemicon)

### Anti-Rabbit-AP:

[0708] AP304A (Chemicon)

### Detection Reagent:

[0709] NBT/BCIP Tablets (Roche)

### Bovine Serum Albumin, (BSA):

[0710] 11926 Serva

### Blocking Reagent:

[0711] 5% low fat milk in TBS

### Buffer Solutions:

[0712] TBS
[0713] 25 mM Tris/HCl-buffer pH 7.5
[0714] +150 mM NaCl
[0715] TTBS
[0716] 25 mM Tris/HCl-buffer pH 7.5
[0717] +150 mM NaCl
[0718] +0.05% Tween 20
[0719] PBS+0.2 mg/ml BSA
[0720] 20 mM NaH₂PO₄ buffer pH 7.4
[0721] +140 mM NaCl
[0722] +0.2 mg/ml BSA

### Antibody Solution I:

[0723] Either Rabbit sera samples or mouse monoclonal antibodies were used as Antibody solution I and prepared as in the following:
[0724] Rabbit sera samples (1:200 diluted in 20 ml 1% low fat milk in TBS)
[0725] Mouse monoclonal antibodies (diluted to 0.2 μg/ml in 20 ml 1% low fat milk in TBS)

### Antibody Solution II:

[0726] In the case Antibody solution I was Rabbit sera samples then Antibody solution II was Anti-Rabbit-AP. In the case Antibody solution I was mouse monoclonal antibodies then Antibody solution II was Anti-Mouse-AP.
[0727] Antibody solution II was prepared as followed:
[0728] Anti-Mouse-AP: 1:5000 dilution in 1% low fat milk in TBS
[0729] Anti-Rabbit-AP: 1:5000 dilution in 1% low fat milk in TBS

### Dot Blot Procedure:

[0730] 1) 1 μl each of the different Aβ standards (in their 5 serial dilutions) were dotted onto the nitrocellulose membrane in a distance of approximately 1 cm from each other.
[0731] 2) The Aβ standards dots were allowed to dry on the nitrocellulose membrane on air for at least 10 min at room temperature (RT) (=dot blot)
[0732] 3) Blocking:
   [0733] The dot blot was incubated with 30 ml 5% low fat milk in TBS for 1.5 h at RT.
[0734] 4) Washing:
   [0735] The blocking solution was discarded and the dot blot was incubated under shaking with 20 ml TTBS for 10 min at RT.
[0736] 5) Antibody solution I:
   [0737] The washing buffer was discarded and the dot blot was incubated with antibody solution I for 2 h at RT.
[0738] 6) Washing:
   [0739] The antibody solution I was discarded and the dot blot was incubated under shaking with 20 ml TTBS for 10 min at RT. The washing solution was discarded and the dot blot was incubated under shaking with 20 ml TTBS for 10 min at RT. The washing solution was discarded and the dot blot was incubated under shaking with 20 ml TBS for 10 min at RT.
[0740] 7) Antibody solution II:
   [0741] The washing buffer was discarded and the dot blot was incubated with antibody solution II for 1 h at RT
[0742] 8) Washing:
   [0743] The antibody solution II was discarded and the dot blot was incubated under shaking with 20 ml TTBS for 10 min at RT. The washing solution was discarded and the dot blot was incubated under shaking with 20 ml TTBS for 10 min at RT. The washing solution was discarded and the dot blot was incubated under shaking with 20 ml TBS for 10 min at RT.
[0744] 9) Development:
   [0745] The washing solution was discarded. 1 tablet NBT/BCIP was dissolved in 20 ml H₂O and the dot blot was incubated for 4 min with this solution. The development was stopped by intensive washing with H₂O.

[0746] The results are shown in FIG. 8.

[0747] The thermolysin truncated (xC, yC) N-Met-Aβ(1-42) oligomers show a comparable recognition by the Aβ globulomer-specific antibody 7C6 and the polyclonal rabbit serum 5599 as the Aβ(1-42) thermolysin truncated globulomer. An exception is thermolysin truncated (15C, 36C) N-Met-Aβ(1-42) oligomer which is only recognized by the polyclonal rabbit serum 5599. This may be due to the cysteine mutation at position 36 in the thermolysin truncated (15C, 36C) N-Met-Aβ(1-42) oligomer which may interfere with the Aβ globulomer epitope recognition of 7C6. Furthermore, the antibody 7C6 and the polyclonal rabbit serum 5599 do not detect the (xC, yC) N-Met-Aβ(1-42) oligomers without thermolysin treatment which is comparable to Aβ(1-42) globulomer. Note, that polyclonal rabbit serum 5599 exhibits in general a high background reaction for all peptides dotted which can not be attributed to a specific recognition of the Aβ globulomer epitope (FIG. 8).

### Example 13

### Iodoacetamide Alkylation of (17C, 34C) Aβ(16-35) Oligomer with SELDI-MS Analysis

### A: (17C, 34C) Aβ(16-35) Oligomer Used for Alkylation:

[0748] The (17C, 34C) Aβ(16-35) oligomer (4p) of example 4p was used.

### B: Iodoacetamide Alkylation

[0749] B1: Control Samples without Iodoacetamide Alkylation
[0750] 2.5 μl of the oligomer were diluted with 50 μl 100 mM Tris/HCl, 1 mM EDTA, pH 8.6 (5 min Helium aerated)
[0751] 20 min incubation at 37° C.
[0752] 20 μl H₂O were added
[0753] 6 h incubation at room temperature
[0754] 1 μl of sample was diluted in 49 μl 50% CH₃CN, 0.5% TFA

### B2: Iodoacetamide Alkylation Samples

[0755] 2.5 μl of the oligomer were diluted with 50 μl 100 mM Tris/HCl, 1 mM EDTA, pH 8.6 (5 min Helium aerated)
[0756] 20 min incubation at 37° C.
[0757] 20 μl 100 mM iodoactamide (Sigma; Cat. no.: I1149) solution in H₂O were added
[0758] 6 h incubation at room temperature
[0759] 1 μl of sample was diluted in 49 μl 50% CH₃CN, 0.5% TFA

### B3: DTT Reduction Followed by Iodoacetamide Alkylation Samples

[0760] 2.5 μl of the oligomer were diluted with 50 μl 100 mM Tris/HCl, 1 mM EDTA, 2 mM DTT, pH 8.6 (Helium aerated)
[0761] 20 min incubation at 37° C.
[0762] 20 μl 100 mM Iodoactamide (Sigma; Cat. no.: I1149) solution in H₂O were added
[0763] 6 h incubation at room temperature
[0764] 1 μl of sample was diluted in 49 μl 50% CH₃CN, 0.5% TFA

### C: Surface-Enhanced Laser Desorption Ionization-Mass Spectrometry (SELDI-MS) Quantification of the Oligomer

[0765] 2 μL sample of samples B1 and B2 and B3 were individually spotted onto a H4 Protein Chip Array (BioRad; Cat. no. C573-0028).
[0766] The spots were allowed to dry on a warm incubator plate.
[0767] CHCA-solution:
   [0768] 5 mg CHCA were dissolved in 150 μL acetonitrile+150 μL 1% TFA=stock solution; stored at −20° C.
   [0769] Of the stock solution 10 μL were diluted with 20 μL acetonitrile and 20 μL 1% TFA=working CHCA-solution.
   [0770] 2 μL of the working CHCA-solution was applied onto the spots
[0771] The spots were allowed to dry on a warm incubator plate and analyzed by SELDI-MS (Surface-Enhanced Laser Desorption Ionization-Mass Spectrometry; BioRad, Protein chip SELDI system enterprise edition).
   [0772] Conditions: mass range: 800 to 10000 Da; focus mass: 2220 Da; matrix attenuation: 500 Da; sampling rate: 400 MHz; warming shots: 2 with energy: 1100 nj; data shots: 10 with energy 1000 nJoule; Partition 1 of 2.
   [0773] Analysis: the peak intensity of the respective double alkylated (2×CM), alkylated (1×CM) or non-alkylated (0×CM) oligomer mass peaks was detected.

[0774] The results are shown in FIG. 9.

[0775] In the absence of DTT as reducing agent iodoacetamide can not alkylate the —SH group of cysteine if this has formed a covalent S—S bridge, the cystine, with another cysteine. Hence, absence of iodoacetamide alkylation reaction of (17C, 34C) Aβ(16-35) oligomer as analyzed by SELDI shows S—S formation has occurred in (17C, 34C) Aβ(16-35) oligomer. That iodoacetamide alkylation reaction can in principle occur was verified under reducing conditions using DTT to destroy S—S and generate free —SH groups which then were found to be amenable for iodoacetamide alkylation (FIG. 9).

### Example 14

### Recognition of (17C, 34C) Aβ(16-35) Oligomer by Aβ Globulomer-Specific Anti-Bodies Using Immunoprecipitation with SELDI-MS Detection

[0776] A: Activation of Dynabeads with Monoclonal Mouse Antibodies
[0777] The stock-suspension of dynabeads (Dynabeads M-280 Sheep anti-Mouse IgG, Invitrogen; Cat. no.: 112.02) was shaken carefully to prevent foaming.
[0778] 1 mL was aseptically removed and transferred to a 1.5 mL reaction vial.
[0779] The dynabeads were washed 3 times 5 min with 1 mL immunoprecipitation (IP)-wash buffer (IP-wash-buffer: PBS (20 mM NaH₂PO₄, 140 mM NaCl, pH 7.4), 0.1% BSA). During the washing procedure the supernatant was carefully removed while the dynabeads were immobilized at the side of the reaction vial with a magnetic separator stand (MSS).
[0780] The washed dynabeads were incubated with 40 μg Aβ antibody in 1 mL PBS, 0.1% BSA
[0781] The activation was carried out by overnight incubation under shaking at 4° C.
[0782] The activated dynabeads were washed 4 times 30 min (again using the MSS) with 1 mL IP-wash buffer (PBS (20 mM NaH₂PO₄, 140 mM NaCl, pH 7.4), 0.1% BSA).
[0783] The activated dynabeads were resuspended with 1 mL PBS, 0.1% BSA, 0.02% NaAzide; vortexed and centrifuged briefly.
[0784] The antibody activated dynabeads were stored at 4° C. until further use.

### B: Preparation of Samples Used for Immunoprecipitation:

[0785] 1: (17C, 34C) Aβ(16-35) Oligomer without Iodoacetamide Alkylation
[0786] 2.5 μl of (17C, 34C) Aβ(16-35) oligomer (4p) of example 4p were diluted with 50 μl 100 mM Tris/HCl, 1 mM EDTA, pH 8.6 (5 min Helium aerated)
[0787] 20 min incubation at 37° C.
[0788] 20 μl H₂O were added
[0789] 6 h incubation at room temperature
[0790] dialysis overnight against 5 mM NaH₂PO₄, 35 mM NaCl, pH 7.4 in Slide-A-Lyzer Mini Dialysis Units Plus Float, 3500 MWCO (Thermo Scientific, #69558)
   2: (17C, 34C) Aβ(16-35) Oligomer with DTT and Iodoacetamide Alkylation
[0791] 2.5 μl of (17C, 34C) Aβ(16-35) oligomer (4p) of example 4p were diluted with 50 μl 100 mM Tris/HCl, 1 mM EDTA, 2 mM DTT, pH 8.6 (Helium aerated)
[0792] 20 min incubation at 37° C.
[0793] 20 μl 100 mM iodoactamide (Sigma; Cat. no.: I1149) solution in H₂O were added
[0794] 6 h incubation at room temperature
[0795] dialysis overnight against 5 mM NaH₂PO₄, 35 mM NaCl, pH 7.4 in Slide-A-Lyzer Mini Dialysis Units Plus Float, 3500 MWCO (Thermo Scientific, #69558)

### C: Immunoprecipitation (IP)

[0796] (17C, 34C) Aβ(16-35) oligomer sample B1 and B2 were diluted with 20 mM NaH₂PO₄, 140 mM NaCl; 0.05% Tween 20, pH 7.4+0.1% BSA to a final concentration of 1 μg/ml.
[0797] 25 μL of each antibody activated dynabeads of the following list were incubated with 0.1 mL of the diluted samples:
   [0798] 10F11-Dynabead
   [0799] 7C6-Dynabeads
   [0800] IgG2a-Dynabeads (used as an isotype control for IP background)
   [0801] IgG2b-Dynabeads (used as an isotype control for IP background)
[0802] The immunoprecipitation was carried out by 18 h incubation under shaking at 6° C.
[0803] The dynabeads were immobilized with the MSS.
[0804] The supernatant was carefully removed and discarded.
[0805] The dynabeads were washed as follows:
   [0806] 2 times 5 minutes with 500 μL 20 mM NaH₂PO₄, 140 mM NaCl, pH 7.4+0.1% BSA;
   [0807] 1 time 3 minutes with 500 μL 2 mM NaH₂PO₄, 14 mM NaCl, pH 7.4;
   [0808] important: after the last removal of the washing buffer the reaction vials were centrifuged, placed back in the MSS and the remaining drops of fluid carefully removed;
   [0809] 10 μL 50% CH₃CN, 0.5% TFA in H₂O were added to the reaction vial and vortexed;
   [0810] the reaction vials were incubated 10 minutes at RT under shaking;
   [0811] the dynabeads were immobilized with the MSS;
   [0812] the supernatant comprising the immunoprecipitated eluted Aβ species was carefully withdrawn (═IP-eluate).

### D: Surface-Enhanced Laser Desorption Ionization-Mass Spectrometry (SELDI-MS) Quantification of the Immunoprecipitated (17C, 34C) Aβ(16-35) Oligomer

[0813] 2 μL IP-eluate was spotted onto a H4 Protein Chip Array (BioRad; Cat. no. C573-0028).
[0814] The spots were allowed to dry on a warm incubator plate.
[0815] CHCA-solution:
   [0816] 5 mg CHCA were dissolved in 150 μL acetonitrile+150 μL 1% TFA=stock solution; stored at −20° C.
   [0817] Of the stock solution 10 μL were diluted with 20 μL acetonitrile and 20 μL 1% TFA=working CHCA-solution.
   [0818] 2 μL of the working CHCA-solution was applied onto the spots
[0819] The spots were allowed to dry on a warm incubator plate and analyzed by SELDI-MS (Surface-Enhanced Laser Desorption Ionization-Mass Spectrometry; BioRad, Protein chip SELDI system enterprise edition).
   [0820] Conditions: mass range: 800 to 10000 Da; focus mass: 2220 Da; matrix attenuation: 500 Da; sampling rate: 400 MHz; warming shots: 2 with energy: 1350 nj; data shots: 10 with energy 1300 nJoule; Partition 1 of 2.
   [0821] Analysis: the peak intensity of the respective Aβ(16-35) peptide mass peaks were quantified.

[0822] The results are shown in FIGS. 10A and 10B.

[0823] The (17C, 34C) Aβ(16-35) oligomer is recognized by the Aβ globulomer epitope specific antibodies 7C6 and 10F11. The unspecific background level during the immunoprecipitation was controlled by the isotype control antibodies IgG2a and IgG2b which show a significantly lower signal intensity in SELDI-MS analysis (FIG. 10A). If the Cysteine S—S covalent reduced by DTT to free —SH and a subsequent iodoacetamide reaction is carried out at the free —SH, the subsequent IP revealed that (17C, 34C) Aβ(16-35) oligomer conformation has been destroyed as the (17C, 34C) Aβ(16-35) peptide with one or two alkylated —SH groups (1× or 2×CM) is no longer recognized by 7C6 or 10F11. Only due to unsufficient DTT reduction and/or iodoacetamide reaction remaining non-alkylated (17C, 34C) Aβ(16-35) oligomer with intact cysteine S—S covalent bond (0×CM) was immunoprecipitated. In conclusion, the (17C, 34C) Aβ(16-35) oligomer contained the Aβ globulomer epitope while a linearized (17C, 34C) Aβ(16-35) peptide did not.

### Reference Examples

### Recombinant N-Met Aβ (1-42) Peptide

[0824] Cloning and Expression: The sequence encoding amyloid-beta peptide was cloned and expressed in E. coli using a pET29 vector. The expressed peptide completely retained its N-terminal methionine residue and represents the native sequence of amyloid beta from positions 0 to position 42 (from within the Amyloid Precursor Protein, APP). Peptide was expressed using E. coli BL21 (DE3) cells. Cells were grown at 30° C. until the culture OD₆₀₀ nm reached 0.45, then expression of Aβ was induced by addition of 1 mM IPTG, and the flasks were transferred to an orbital shaker at 41° C. Cells were harvested 3 hour post-induction. The insoluble fraction yielded a product of the expected size, as visualized on a Comassie-stained SDS protein gel.

[0825] Purification of Recombinantly Expressed Aβ. The starting material for all isolated samples was cell paste frozen at −80° C. obtained from harvests of E. coli cell cultures. Frozen cell paste was added to 5-10 volumes of lysis buffer (100 mM Tris final pH 7.5) at 4° C. Benzonase, (EMD Biosciences, Madison, Wis.) was added to a concentration of 0.1 μl/ml of cell lysate and stirred until the pellet was uniformly resuspended (45-60 min). Cell lysis was performed using a M-110L microfluidizer (Microfluidics, Newton, Pa.). The lysed material at 15° C. was spun at 23000×G in a JLA 16.25 rotor (Beckman Instruments, Palo Alto, Calif.) for 30 min at 4° C. The material was washed three times by adding cold 50 mM Tris buffer at pH 7.5 to 7.8 and then the resuspended pellets were homogenized and spun at 23000×G in a JLA 16.25 rotor. This was followed by a water wash to remove the Tris buffer. The pellet was resuspended in water containing 0.1% trifluoroacetic acid. The resuspended sample was shell frozen and put on a lyophilizer.

[0826] 10-20 g of lyophilized material was added to DMSO at 37° C. and homogenized using a tissue homogenizer and stirred for 1 h then allowed to sit overnight. The sample was then spun in two 250 mL nalgene bottles at 25° C. for 30 minutes, 23000×G in a JLA16.25 rotor. The DMSO supernate was decanted and another 50 mL DMSO was added to each bottle, homogenized and spun and then this DMSO was decanted and also saved. The pellets were discarded.

[0827] The DMSO extract was carefully poured into a 6000-8000 cut-off dialysis membrane, (Spectrum Laboratories, Rancho Dominguez, Calif.), sufficient to hold about 1.5 L. It was dialyzed against 10 L of 15% acetonitrile to which 10 mL of concentrated ammonia (0.1% v/v) had been added. This was allowed to dialyze for four hours on the bench. Periodically, the dialysis membrane was taken out so as to redistribute the dense DMSO and accelerate the dialysis process. At the end of four hours, the membrane was placed into a fresh change of 10 L of buffer and the process continued for another two hours. At the end of the dialysis, the sample was removed and centrifuged at 23000×G for 30 min at 25° C. The sample was transferred to a 2 L cylinder and diluted two fold with 0.1% ammonia in water to a total volume as large as 2000 ml.

[0828] A 2.2×25 cm, (95 mL) stainless column was hand packed with 15-20 micron, 300 A, PLPR-S reversed phase resin from Polymer Labs (Amherst, Mass.). It was taken through a cycle from 75% acetonitrile+0.1% ammonia, (75% B) and equilibrated to 10% B. The column was connected to a Pharmacia P500 pump (Amersham Biosciences, Piscataway, N.J.), and 1400 mL of the peptide solution was pumped through the column overnight on the bench at room temperature over ˜16.7 hr. The next morning, the column was washed with the P500 pump with about 250 mL 10% B and then connected to a Beckman HPLC (Palo Alto, Calif.). Washing was continued with 10% B until the absorbance at 280 nm came to baseline and then a gradient was initiated from 10° AB to 30% B over 200 minutes (0.1% gradient). The full-scale absorbance was kept at 1 absorbance unit and the flow at 5 mL/min. The material was hand collected in about 50 fractions of about 10 mL. 100 uL of each of the fractions were put on a speed vac, dried and 100 uL of 1× sample buffer added to the tubes. The material was concentrated on a 3500 cut-off membrane on an Amicon (Millipore Inc, Billerica, Calif.) stirred cell and concentrated from ˜350 to 50 mL it was then lyophilized to dryness overnight.

[0829] Purified Aβ peptide produced exhibited an observed mass of 4645 to 4648 Da. This was consistent with the presence of N-terminal methionine as expected from the DNA expression sequence employed.

### Reference Examples

### Reference Example 1

### Aβ(1-42) Globulomer

[0830] The Aβ(1-42) synthetic peptide (H-1368, Bachem, Bubendorf, Switzerland) was suspended in 100% 1,1,1,3,3,3-hexafluoro-2-propanol (HFIP) at 6 mg/mL and incubated for complete solubilization under shaking at 37° C. for 1.5 h. The HFIP acts as a hydrogen-bond breaker and is used to eliminate pre-existing structural inhomogeneities in the Aβ peptide. HFIP was removed by evaporation in a SpeedVac and Aβ(1-42) resuspended at a concentration of 5 mM in dimethylsulfoxide and sonicated for 20 s. The HFIP-pre-treated Aβ(1-42) was diluted in phosphate-buffered saline (PBS) (20 mM NaH₂PO₄, 140 mM NaCl, pH 7.4) to 400 μM and 1/10 volume 2% sodium dodecyl sulfate (SDS) (in H₂O) added (final concentration of 0.2% SDS). An incubation for 6 h at 37° C. resulted in the 16/20-kDa Aβ(1-42) globulomer intermediate. The 38/48-kDa Aβ(1-42) globulomer was generated by a further dilution with three volumes of H₂O and incubation for 18 h at 37° C. After centrifugation at 3000 g for 20 min the sample was concentrated by ultrafiltration (30-kDa cut-off), dialysed against 5 mM NaH₂PO₄, 35 mM NaCl, pH 7.4, centrifuged at 10000 g for 10 min and the supernatant comprising the 38/48-kDa Aβ(1-42) globulomer withdrawn.

### Reference Example 2

### N-Met Aβ(1-42) Globulomer

[0831] 6 mg human amyloid β(1-42) peptide (Bachem Biosciences, King of Prussia, Pa.) or recombinant N-Met Aβ (1-42) peptide+2×500 μL HFIP (hexafluoroisopropanol) (6 mg/mL suspension) in two 1.6 mL Eppitubes (2×500 μL portions) (Eppendorf Northamerica, Westbury, N.Y.) were shaken for 1.5 h at 37° C., dried in speedvac for 1.5 h and then resuspended in 2 aliquots of 132 μL each of DMSO, sonicated in a water bath for 20 seconds, shaken gently for 10 min on a plate agitator; and stored at −20° C. 690 μL 20 mM NaPO₄; 140 mM NaCl; pH 7.4 buffer were filled in a 15 mL Falcon tube, 60 μL 5 mM amyloid stock suspension in DMSO (400 μM amyloid) and then 75 μl 2% SDS in water (0.2% SDS) were added. The mixture was incubated for 6-8 h at 37° C. and 2475 μL water (4 fold dilution with water) were added for a final volume of 3.3 mL. The mixture was incubate for 18-20 h at 37° C., centrifuged 10 min at 3000×G and finally the supernatant was concentrated to 1 mL by 30 kDa Centriprep (Millipore Inc, Billerica, Calif.). The sample was dialyzed overnight in PBS/4 (PBS=phosphate buffered saline, 1 mM KCl, 154 mM NaCl, 4 mM phosphate, pH 7.4; PBS/432 PBS diluted 1 to 4 with distilled water, pH 7.4 final) at 4° C. in a 12-15 kDa cut-off dialysis tubing. The concentrate was centrifuged at 10,000×G for 10 min in an Eppendorff tube (clear pellet), aliquoted in 250 μL and freezed at −20° C.

### Reference Example 3

### Aβ(20-42) Globulomer

[0832] 1.59 ml of the Aβ(1-42) globulomer preparation of reference example 3 were admixed with 38 ml of buffer (50 mM MES/NaOH, pH 7.4) and 200 μl of a 1 mg/ml thermolysin solution (Roche) in water. The reaction mixture was stirred at RT for 20 h. Then 80 μl of a 100 mM EDTA solution, pH 7.4, in water were added and the mixture was furthermore adjusted to an SDS content of 0.01% with 400 μl of a 1% strength SDS solution. The reaction mixture was concentrated to approx. 1 ml via a 15 ml 30 kDa Centriprep tube. The concentrate was admixed with 9 ml of buffer (50 mM MES/NaOH, 0.02% SDS, pH 7.4) and again concentrated to 1 ml. The concentrate was dialyzed at 6° C. against 1 l of buffer (5 mM sodium phosphate, 35 mM NaCl) in a dialysis tube for 16 h. The dialysate was adjusted to an SDS content of 0.1% with a 2% strength SDS solution in water. The sample was centrifuged at 10000 g for 10 min and the Aβ(20-42) globulomer supernatant was withdrawn.

### Reference Example 4

### Aβ(12-42) Globulomer

[0833] 2 ml of the Aβ(1-42) globulomer preparation of reference example 3 were admixed with 38 ml buffer (5 mM sodium phosphate, 35 mM sodium chloride, pH 7.4) and 150 μl of a 1 mg/ml GIuC endoproteinase (Roche) in water. The reaction mixture was stirred for 6 h at RT, and a further 150 μl of a 1 mg/ml GIuC endoproteinase (Roche) in water were subsequently added. The reaction mixture was stirred at RT for another 16 h, followed by addition of 8 μl of a 5 M DIFP solution. The reaction mixture was concentrated to approx. 1 ml via a 15 ml 30 kDa Centriprep tube. The concentrate was admixed with 9 ml of buffer (5 mM sodium phosphate, 35 mM sodium chloride, pH 7.4) and again concentrated to 1 ml. The concentrate was dialyzed at 6° C. against 1 l of buffer (5 mM sodium phosphate, 35 mM NaCl) in a dialysis tube for 16 h. The dialysate was adjusted to an SDS content of 0.1% with a 1% strength SDS solution in water. The sample was centrifuged at 10000 g for 10 min and the Aβ(12-42) globulomer supernatant was withdrawn.

### Reference Example 5

### Aβ(1-40) Monomer (0.1% NaOH)

[0834] 1 mg Aβ(1-40) (Bachem Inc., cat. no. H-1194) was dissolved in 232.6 μl 0.1% NaOH in H₂O (freshly prepared) (=4.3 mg/ml=1 nmol/1 μl) and immediately shaken for 30 sec. at room temperature to get a clear solution. The sample was stored at −20° C. for further use.

### Reference Example 6

### Aβ(1-42) Monomer (0.1% NaOH)

[0835] 1 mg Aβ(1-42) (Bachem Inc., cat. no. H-1368) were dissolved in 222.2 μl 0.1% NaOH in H₂O (freshly prepared) (=4.5 mg/ml=1 nmol/1 μl) and immediately shaken for 30 sec. at room temperature to get a clear solution. The sample was stored at −20° C. for further use.

### Reference Example 7

### Aβ Fibrils

[0836] 1 mg Aβ(1-42) (Bachem Inc. Catalog Nr.: H-1368) were dissolved in 500 μl aqueous 0.1% NH₄OH (Eppendorff tube) and the sample was stirred for 1 min at room temperature. The sample was centrifuged for 5 min at 10000×g and the supernatant was withdrawn. 100 μl of this freshly prepared Aβ(1-42) solution were neutralized with 300 μl 20 mM NaH₂PO₄; 140 mM NaCl, pH 7.4. The pH was adjusted to pH 7.4 with 1% HCl. The sample was incubated for 24 h at 37° C. and centrifuged (10 min at 10000×g). The supernatant was discarded and the fibril pellet washed twice with 400 μl 20 mM NaH₂PO₄, 140 mM NaCl, pH 7.4 and then finally resuspended with 400 μl of 20 mM NaH₂PO₄; 140 mM NaCl, pH 7.4 by vortexing for 1 min.

### Reference Example 8

### sAPPα

[0837] Supplied from Sigma (cat. no. S9564; 25 μg in 20 mM NaH₂PO₄; 140 mM NaCl; pH 7.4). The sAPPα was diluted with 20 mM NaH₂PO₄, 140 mM NaCl, pH 7.4, 0.2 mg/ml BSA to 0.1 mg/ml (=1 pmol/μl).

### Reference Example 9

### Polyclonal Antiserum 5599

[0838] The polyclonal antiserum 5599 was obtained in the manner as polyclonal antiserum 5600 described in WO 2004/067561, Example 25a, Serum a1 5600, with the exception that Aβ(20-42) globulomer was used instead of 5600 LPH conjugated Aβ(20-42) globulomer.

The application's sequence listing, which the Patent Office published only in electronic form, follows.

SEQUENCE LISTING (960 sequences)

SEQ ID NO: 1 - protein, 43 aa, Artificial Sequence
  synthetic
DAEFRHDSGYEVHHQKLVFFAEDVGSNKGAIIGLMVGGVVIAT

SEQ ID NO: 2 - protein, 42 aa, Artificial Sequence
  synthetic
AEFRHDSGYEVHHQKLVFFAEDVGSNKGAIIGLMVGGVVIAT

SEQ ID NO: 3 - protein, 41 aa, Artificial Sequence
  synthetic
EFRHDSGYEVHHQKLVFFAEDVGSNKGAIIGLMVGGVVIAT

SEQ ID NO: 4 - protein, 40 aa, Artificial Sequence
  synthetic
FRHDSGYEVHHQKLVFFAEDVGSNKGAIIGLMVGGVVIAT

SEQ ID NO: 5 - protein, 39 aa, Artificial Sequence
  synthetic
RHDSGYEVHHQKLVFFAEDVGSNKGAIIGLMVGGVVIAT

SEQ ID NO: 6 - protein, 38 aa, Artificial Sequence
  synthetic
HDSGYEVHHQKLVFFAEDVGSNKGAIIGLMVGGVVIAT

SEQ ID NO: 7 - protein, 37 aa, Artificial Sequence
  synthetic
DSGYEVHHQKLVFFAEDVGSNKGAIIGLMVGGVVIAT

SEQ ID NO: 8 - protein, 36 aa, Artificial Sequence
  synthetic
SGYEVHHQKLVFFAEDVGSNKGAIIGLMVGGVVIAT

SEQ ID NO: 9 - protein, 35 aa, Artificial Sequence
  synthetic
GYEVHHQKLVFFAEDVGSNKGAIIGLMVGGVVIAT

SEQ ID NO: 10 - protein, 34 aa, Artificial Sequence
  synthetic
YEVHHQKLVFFAEDVGSNKGAIIGLMVGGVVIAT

SEQ ID NO: 11 - protein, 33 aa, Artificial Sequence
  synthetic
EVHHQKLVFFAEDVGSNKGAIIGLMVGGVVIAT

SEQ ID NO: 12 - protein, 32 aa, Artificial Sequence
  synthetic
VHHQKLVFFAEDVGSNKGAIIGLMVGGVVIAT

SEQ ID NO: 13 - protein, 31 aa, Artificial Sequence
  synthetic
HHQKLVFFAEDVGSNKGAIIGLMVGGVVIAT

SEQ ID NO: 14 - protein, 30 aa, Artificial Sequence
  synthetic
HQKLVFFAEDVGSNKGAIIGLMVGGVVIAT

SEQ ID NO: 15 - protein, 29 aa, Artificial Sequence
  synthetic
QKLVFFAEDVGSNKGAIIGLMVGGVVIAT

SEQ ID NO: 16 - protein, 28 aa, Artificial Sequence
  synthetic
KLVFFAEDVGSNKGAIIGLMVGGVVIAT

SEQ ID NO: 17 - protein, 27 aa, Artificial Sequence
  synthetic
LVFFAEDVGSNKGAIIGLMVGGVVIAT

SEQ ID NO: 18 - protein, 26 aa, Artificial Sequence
  synthetic
VFFAEDVGSNKGAIIGLMVGGVVIAT

SEQ ID NO: 19 - protein, 25 aa, Artificial Sequence
  synthetic
FFAEDVGSNKGAIIGLMVGGVVIAT

SEQ ID NO: 20 - protein, 24 aa, Artificial Sequence
  synthetic
FAEDVGSNKGAIIGLMVGGVVIAT

SEQ ID NO: 21 - protein, 23 aa, Artificial Sequence
  synthetic
AEDVGSNKGAIIGLMVGGVVIAT

SEQ ID NO: 22 - protein, 22 aa, Artificial Sequence
  synthetic
EDVGSNKGAIIGLMVGGVVIAT

SEQ ID NO: 23 - protein, 21 aa, Artificial Sequence
  synthetic
DVGSNKGAIIGLMVGGVVIAT

SEQ ID NO: 24 - protein, 42 aa, Artificial Sequence [sequence omitted]

SEQ ID NO: 25 - protein, 41 aa, Artificial Sequence
  synthetic
AEFRHDSGYEVHHQKLVFFAEDVGSNKGAIIGLMVGGVVIA

SEQ ID NO: 26 - protein, 40 aa, Artificial Sequence
  synthetic
EFRHDSGYEVHHQKLVFFAEDVGSNKGAIIGLMVGGVVIA

SEQ ID NO: 27 - protein, 39 aa, Artificial Sequence
  synthetic
FRHDSGYEVHHQKLVFFAEDVGSNKGAIIGLMVGGVVIA

SEQ ID NO: 28 - protein, 38 aa, Artificial Sequence
  synthetic
RHDSGYEVHHQKLVFFAEDVGSNKGAIIGLMVGGVVIA

SEQ ID NO: 29 - protein, 37 aa, Artificial Sequence
  synthetic
HDSGYEVHHQKLVFFAEDVGSNKGAIIGLMVGGVVIA

SEQ ID NO: 30 - protein, 36 aa, Artificial Sequence
  synthetic
DSGYEVHHQKLVFFAEDVGSNKGAIIGLMVGGVVIA

SEQ ID NO: 31 - protein, 35 aa, Artificial Sequence
  synthetic
SGYEVHHQKLVFFAEDVGSNKGAIIGLMVGGVVIA

SEQ ID NO: 32 - protein, 34 aa, Artificial Sequence
  synthetic
GYEVHHQKLVFFAEDVGSNKGAIIGLMVGGVVIA

SEQ ID NO: 33 - protein, 33 aa, Artificial Sequence
  synthetic
YEVHHQKLVFFAEDVGSNKGAIIGLMVGGVVIA

SEQ ID NO: 34 - protein, 32 aa, Artificial Sequence
  synthetic
EVHHQKLVFFAEDVGSNKGAIIGLMVGGVVIA

SEQ ID NO: 35 - protein, 31 aa, Artificial Sequence
  synthetic
VHHQKLVFFAEDVGSNKGAIIGLMVGGVVIA

SEQ ID NO: 36 - protein, 30 aa, Artificial Sequence
  synthetic
HHQKLVFFAEDVGSNKGAIIGLMVGGVVIA

SEQ ID NO: 37 - protein, 29 aa, Artificial Sequence
  synthetic
HQKLVFFAEDVGSNKGAIIGLMVGGVVIA

SEQ ID NO: 38 - protein, 28 aa, Artificial Sequence
  synthetic
QKLVFFAEDVGSNKGAIIGLMVGGVVIA

SEQ ID NO: 39 - protein, 27 aa, Artificial Sequence
  synthetic
KLVFFAEDVGSNKGAIIGLMVGGVVIA

SEQ ID NO: 40 - protein, 26 aa, Artificial Sequence
  synthetic
LVFFAEDVGSNKGAIIGLMVGGVVIA

SEQ ID NO: 41 - protein, 25 aa, Artificial Sequence
  synthetic
VFFAEDVGSNKGAIIGLMVGGVVIA

SEQ ID NO: 42 - protein, 24 aa, Artificial Sequence
  synthetic
FFAEDVGSNKGAIIGLMVGGVVIA

SEQ ID NO: 43 - protein, 23 aa, Artificial Sequence
  synthetic
FAEDVGSNKGAIIGLMVGGVVIA

SEQ ID NO: 44 - protein, 22 aa, Artificial Sequence
  synthetic
AEDVGSNKGAIIGLMVGGVVIA

SEQ ID NO: 45 - protein, 21 aa, Artificial Sequence
  synthetic
EDVGSNKGAIIGLMVGGVVIA

SEQ ID NO: 46 - protein, 20 aa, Artificial Sequence
  synthetic
DVGSNKGAIIGLMVGGVVIA

SEQ ID NO: 47 - protein, 41 aa, Artificial Sequence
  synthetic
DAEFRHDSGYEVHHQKLVFFAEDVGSNKGAIIGLMVGGVVI

SEQ ID NO: 48 - protein, 40 aa, Artificial Sequence
  synthetic
AEFRHDSGYEVHHQKLVFFAEDVGSNKGAIIGLMVGGVVI

SEQ ID NO: 49 - protein, 39 aa, Artificial Sequence
  synthetic
EFRHDSGYEVHHQKLVFFAEDVGSNKGAIIGLMVGGVVI

SEQ ID NO: 50 - protein, 38 aa, Artificial Sequence
  synthetic
FRHDSGYEVHHQKLVFFAEDVGSNKGAIIGLMVGGVVI

SEQ ID NO: 51 - protein, 37 aa, Artificial Sequence
  synthetic
RHDSGYEVHHQKLVFFAEDVGSNKGAIIGLMVGGVVI

SEQ ID NO: 52 - protein, 36 aa, Artificial Sequence
  synthetic
HDSGYEVHHQKLVFFAEDVGSNKGAIIGLMVGGVVI

SEQ ID NO: 53 - protein, 35 aa, Artificial Sequence
  synthetic
DSGYEVHHQKLVFFAEDVGSNKGAIIGLMVGGVVI

SEQ ID NO: 54 - protein, 34 aa, Artificial Sequence
  synthetic
SGYEVHHQKLVFFAEDVGSNKGAIIGLMVGGVVI

SEQ ID NO: 55 - protein, 33 aa, Artificial Sequence
  synthetic
GYEVHHQKLVFFAEDVGSNKGAIIGLMVGGVVI

SEQ ID NO: 56 - protein, 32 aa, Artificial Sequence
  synthetic
YEVHHQKLVFFAEDVGSNKGAIIGLMVGGVVI

SEQ ID NO: 57 - protein, 31 aa, Artificial Sequence
  synthetic
EVHHQKLVFFAEDVGSNKGAIIGLMVGGVVI

SEQ ID NO: 58 - protein, 30 aa, Artificial Sequence
  synthetic
VHHQKLVFFAEDVGSNKGAIIGLMVGGVVI

SEQ ID NO: 59 - protein, 29 aa, Artificial Sequence
  synthetic
HHQKLVFFAEDVGSNKGAIIGLMVGGVVI

SEQ ID NO: 60 - protein, 28 aa, Artificial Sequence
  synthetic
HQKLVFFAEDVGSNKGAIIGLMVGGVVI

SEQ ID NO: 61 - protein, 27 aa, Artificial Sequence
  synthetic
QKLVFFAEDVGSNKGAIIGLMVGGVVI

SEQ ID NO: 62 - protein, 26 aa, Artificial Sequence
  synthetic
KLVFFAEDVGSNKGAIIGLMVGGVVI

SEQ ID NO: 63 - protein, 25 aa, Artificial Sequence
  synthetic
LVFFAEDVGSNKGAIIGLMVGGVVI

SEQ ID NO: 64 - protein, 24 aa, Artificial Sequence
  synthetic
VFFAEDVGSNKGAIIGLMVGGVVI

SEQ ID NO: 65 - protein, 23 aa, Artificial Sequence
  synthetic
FFAEDVGSNKGAIIGLMVGGVVI

SEQ ID NO: 66 - protein, 22 aa, Artificial Sequence
  synthetic
FAEDVGSNKGAIIGLMVGGVVI

SEQ ID NO: 67 - protein, 21 aa, Artificial Sequence
  synthetic
AEDVGSNKGAIIGLMVGGVVI

SEQ ID NO: 68 - protein, 20 aa, Artificial Sequence
  synthetic
EDVGSNKGAIIGLMVGGVVI

SEQ ID NO: 69 - protein, 19 aa, Artificial Sequence
  synthetic
DVGSNKGAIIGLMVGGVVI

SEQ ID NO: 70 - protein, 40 aa, Artificial Sequence
  synthetic
DAEFRHDSGYEVHHQKLVFFAEDVGSNKGAIIGLMVGGVV

SEQ ID NO: 71 - protein, 39 aa, Artificial Sequence
  synthetic
AEFRHDSGYEVHHQKLVFFAEDVGSNKGAIIGLMVGGVV

SEQ ID NO: 72 - protein, 38 aa, Artificial Sequence
  synthetic
EFRHDSGYEVHHQKLVFFAEDVGSNKGAIIGLMVGGVV

SEQ ID NO: 73 - protein, 37 aa, Artificial Sequence
  synthetic
FRHDSGYEVHHQKLVFFAEDVGSNKGAIIGLMVGGVV

SEQ ID NO: 74 - protein, 36 aa, Artificial Sequence
  synthetic
RHDSGYEVHHQKLVFFAEDVGSNKGAIIGLMVGGVV

SEQ ID NO: 75 - protein, 35 aa, Artificial Sequence
  synthetic
HDSGYEVHHQKLVFFAEDVGSNKGAIIGLMVGGVV

SEQ ID NO: 76 - protein, 34 aa, Artificial Sequence
  synthetic
DSGYEVHHQKLVFFAEDVGSNKGAIIGLMVGGVV

SEQ ID NO: 77 - protein, 33 aa, Artificial Sequence
  synthetic
SGYEVHHQKLVFFAEDVGSNKGAIIGLMVGGVV

SEQ ID NO: 78 - protein, 32 aa, Artificial Sequence
  synthetic
GYEVHHQKLVFFAEDVGSNKGAIIGLMVGGVV

SEQ ID NO: 79 - protein, 31 aa, Artificial Sequence
  synthetic
YEVHHQKLVFFAEDVGSNKGAIIGLMVGGVV

SEQ ID NO: 80 - protein, 30 aa, Artificial Sequence
  synthetic
EVHHQKLVFFAEDVGSNKGAIIGLMVGGVV

SEQ ID NO: 81 - protein, 29 aa, Artificial Sequence
  synthetic
VHHQKLVFFAEDVGSNKGAIIGLMVGGVV

SEQ ID NO: 82 - protein, 28 aa, Artificial Sequence
  synthetic
HHQKLVFFAEDVGSNKGAIIGLMVGGVV

SEQ ID NO: 83 - protein, 27 aa, Artificial Sequence
  synthetic
HQKLVFFAEDVGSNKGAIIGLMVGGVV

SEQ ID NO: 84 - protein, 26 aa, Artificial Sequence
  synthetic
QKLVFFAEDVGSNKGAIIGLMVGGVV

SEQ ID NO: 85 - protein, 25 aa, Artificial Sequence
  synthetic
KLVFFAEDVGSNKGAIIGLMVGGVV

SEQ ID NO: 86 - protein, 24 aa, Artificial Sequence
  synthetic
LVFFAEDVGSNKGAIIGLMVGGVV

SEQ ID NO: 87 - protein, 23 aa, Artificial Sequence
  synthetic
VFFAEDVGSNKGAIIGLMVGGVV

SEQ ID NO: 88 - protein, 22 aa, Artificial Sequence
  synthetic
FFAEDVGSNKGAIIGLMVGGVV

SEQ ID NO: 89 - protein, 21 aa, Artificial Sequence
  synthetic
FAEDVGSNKGAIIGLMVGGVV

SEQ ID NO: 90 - protein, 20 aa, Artificial Sequence
  synthetic
AEDVGSNKGAIIGLMVGGVV

SEQ ID NO: 91 - protein, 19 aa, Artificial Sequence
  synthetic
EDVGSNKGAIIGLMVGGVV

SEQ ID NO: 92 - protein, 18 aa, Artificial Sequence
  synthetic
DVGSNKGAIIGLMVGGVV

SEQ ID NO: 93 - protein, 39 aa, Artificial Sequence
  synthetic
DAEFRHDSGYEVHHQKLVFFAEDVGSNKGAIIGLMVGGV

SEQ ID NO: 94 - protein, 38 aa, Artificial Sequence
  synthetic
AEFRHDSGYEVHHQKLVFFAEDVGSNKGAIIGLMVGGV

SEQ ID NO: 95 - protein, 37 aa, Artificial Sequence
  synthetic
EFRHDSGYEVHHQKLVFFAEDVGSNKGAIIGLMVGGV

SEQ ID NO: 96 - protein, 36 aa, Artificial Sequence
  synthetic
FRHDSGYEVHHQKLVFFAEDVGSNKGAIIGLMVGGV

SEQ ID NO: 97 - protein, 35 aa, Artificial Sequence
  synthetic
RHDSGYEVHHQKLVFFAEDVGSNKGAIIGLMVGGV

SEQ ID NO: 98 - protein, 34 aa, Artificial Sequence
  synthetic
HDSGYEVHHQKLVFFAEDVGSNKGAIIGLMVGGV

SEQ ID NO: 99 - protein, 33 aa, Artificial Sequence
  synthetic
DSGYEVHHQKLVFFAEDVGSNKGAIIGLMVGGV

SEQ ID NO: 100 - protein, 32 aa, Artificial Sequence
  synthetic
SGYEVHHQKLVFFAEDVGSNKGAIIGLMVGGV

SEQ ID NO: 101 - protein, 31 aa, Artificial Sequence
  synthetic
GYEVHHQKLVFFAEDVGSNKGAIIGLMVGGV

SEQ ID NO: 102 - protein, 30 aa, Artificial Sequence
  synthetic
YEVHHQKLVFFAEDVGSNKGAIIGLMVGGV

SEQ ID NO: 103 - protein, 29 aa, Artificial Sequence
  synthetic
EVHHQKLVFFAEDVGSNKGAIIGLMVGGV

SEQ ID NO: 104 - protein, 28 aa, Artificial Sequence
  synthetic
VHHQKLVFFAEDVGSNKGAIIGLMVGGV

SEQ ID NO: 105 - protein, 27 aa, Artificial Sequence
  synthetic
HHQKLVFFAEDVGSNKGAIIGLMVGGV

SEQ ID NO: 106 - protein, 26 aa, Artificial Sequence
  synthetic
HQKLVFFAEDVGSNKGAIIGLMVGGV

SEQ ID NO: 107 - protein, 25 aa, Artificial Sequence
  synthetic
QKLVFFAEDVGSNKGAIIGLMVGGV

SEQ ID NO: 108 - protein, 24 aa, Artificial Sequence
  synthetic
KLVFFAEDVGSNKGAIIGLMVGGV

SEQ ID NO: 109 - protein, 23 aa, Artificial Sequence
  synthetic
LVFFAEDVGSNKGAIIGLMVGGV

SEQ ID NO: 110 - protein, 22 aa, Artificial Sequence
  synthetic
VFFAEDVGSNKGAIIGLMVGGV

SEQ ID NO: 111 - protein, 21 aa, Artificial Sequence
  synthetic
FFAEDVGSNKGAIIGLMVGGV

SEQ ID NO: 112 - protein, 20 aa, Artificial Sequence
  synthetic
FAEDVGSNKGAIIGLMVGGV

SEQ ID NO: 113 - protein, 19 aa, Artificial Sequence
  synthetic
AEDVGSNKGAIIGLMVGGV

SEQ ID NO: 114 - protein, 18 aa, Artificial Sequence
  synthetic
EDVGSNKGAIIGLMVGGV

SEQ ID NO: 115 - protein, 17 aa, Artificial Sequence
  synthetic
DVGSNKGAIIGLMVGGV

SEQ ID NO: 116 - protein, 38 aa, Artificial Sequence
  synthetic
DAEFRHDSGYEVHHQKLVFFAEDVGSNKGAIIGLMVGG

SEQ ID NO: 117 - protein, 37 aa, Artificial Sequence
  synthetic
AEFRHDSGYEVHHQKLVFFAEDVGSNKGAIIGLMVGG

SEQ ID NO: 118 - protein, 36 aa, Artificial Sequence
  synthetic
EFRHDSGYEVHHQKLVFFAEDVGSNKGAIIGLMVGG

SEQ ID NO: 119 - protein, 35 aa, Artificial Sequence
  synthetic
FRHDSGYEVHHQKLVFFAEDVGSNKGAIIGLMVGG

SEQ ID NO: 120 - protein, 34 aa, Artificial Sequence
  synthetic
RHDSGYEVHHQKLVFFAEDVGSNKGAIIGLMVGG

SEQ ID NO: 121 - protein, 33 aa, Artificial Sequence
  synthetic
HDSGYEVHHQKLVFFAEDVGSNKGAIIGLMVGG

SEQ ID NO: 122 - protein, 32 aa, Artificial Sequence
  synthetic
DSGYEVHHQKLVFFAEDVGSNKGAIIGLMVGG

SEQ ID NO: 123 - protein, 31 aa, Artificial Sequence
  synthetic
SGYEVHHQKLVFFAEDVGSNKGAIIGLMVGG

SEQ ID NO: 124 - protein, 30 aa, Artificial Sequence
  synthetic
GYEVHHQKLVFFAEDVGSNKGAIIGLMVGG

SEQ ID NO: 125 - protein, 29 aa, Artificial Sequence
  synthetic
YEVHHQKLVFFAEDVGSNKGAIIGLMVGG

SEQ ID NO: 126 - protein, 28 aa, Artificial Sequence
  synthetic
EVHHQKLVFFAEDVGSNKGAIIGLMVGG

SEQ ID NO: 127 - protein, 27 aa, Artificial Sequence
  synthetic
VHHQKLVFFAEDVGSNKGAIIGLMVGG

SEQ ID NO: 128 - protein, 26 aa, Artificial Sequence
  synthetic
HHQKLVFFAEDVGSNKGAIIGLMVGG

SEQ ID NO: 129 - protein, 25 aa, Artificial Sequence
  synthetic
HQKLVFFAEDVGSNKGAIIGLMVGG

SEQ ID NO: 130 - protein, 24 aa, Artificial Sequence
  synthetic
QKLVFFAEDVGSNKGAIIGLMVGG

SEQ ID NO: 131 - protein, 23 aa, Artificial Sequence
  synthetic
KLVFFAEDVGSNKGAIIGLMVGG

SEQ ID NO: 132 - protein, 22 aa, Artificial Sequence
  synthetic
LVFFAEDVGSNKGAIIGLMVGG

SEQ ID NO: 133 - protein, 21 aa, Artificial Sequence
  synthetic
VFFAEDVGSNKGAIIGLMVGG

SEQ ID NO: 134 - protein, 20 aa, Artificial Sequence
  synthetic
FFAEDVGSNKGAIIGLMVGG

SEQ ID NO: 135 - protein, 19 aa, Artificial Sequence
  synthetic
FAEDVGSNKGAIIGLMVGG

SEQ ID NO: 136 - protein, 18 aa, Artificial Sequence
  synthetic
AEDVGSNKGAIIGLMVGG

SEQ ID NO: 137 - protein, 17 aa, Artificial Sequence
  synthetic
EDVGSNKGAIIGLMVGG

SEQ ID NO: 138 - protein, 16 aa, Artificial Sequence
  synthetic
DVGSNKGAIIGLMVGG

SEQ ID NO: 139 - protein, 37 aa, Artificial Sequence
  synthetic
DAEFRHDSGYEVHHQKLVFFAEDVGSNKGAIIGLMVG

SEQ ID NO: 140 - protein, 36 aa, Artificial Sequence
  synthetic
AEFRHDSGYEVHHQKLVFFAEDVGSNKGAIIGLMVG

SEQ ID NO: 141 - protein, 35 aa, Artificial Sequence
  synthetic
EFRHDSGYEVHHQKLVFFAEDVGSNKGAIIGLMVG

SEQ ID NO: 142 - protein, 34 aa, Artificial Sequence
  synthetic
FRHDSGYEVHHQKLVFFAEDVGSNKGAIIGLMVG

SEQ ID NO: 143 - protein, 33 aa, Artificial Sequence
  synthetic
RHDSGYEVHHQKLVFFAEDVGSNKGAIIGLMVG

SEQ ID NO: 144 - protein, 32 aa, Artificial Sequence
  synthetic
HDSGYEVHHQKLVFFAEDVGSNKGAIIGLMVG

SEQ ID NO: 145 - protein, 31 aa, Artificial Sequence
  synthetic
DSGYEVHHQKLVFFAEDVGSNKGAIIGLMVG

SEQ ID NO: 146 - protein, 30 aa, Artificial Sequence
  synthetic
SGYEVHHQKLVFFAEDVGSNKGAIIGLMVG

SEQ ID NO: 147 - protein, 29 aa, Artificial Sequence
  synthetic
GYEVHHQKLVFFAEDVGSNKGAIIGLMVG

SEQ ID NO: 148 - protein, 28 aa, Artificial Sequence
  synthetic
YEVHHQKLVFFAEDVGSNKGAIIGLMVG

SEQ ID NO: 149 - protein, 27 aa, Artificial Sequence
  synthetic
EVHHQKLVFFAEDVGSNKGAIIGLMVG

SEQ ID NO: 150 - protein, 26 aa, Artificial Sequence
  synthetic
VHHQKLVFFAEDVGSNKGAIIGLMVG

SEQ ID NO: 151 - protein, 25 aa, Artificial Sequence
  synthetic
HHQKLVFFAEDVGSNKGAIIGLMVG

SEQ ID NO: 152 - protein, 24 aa, Artificial Sequence
  synthetic
HQKLVFFAEDVGSNKGAIIGLMVG

SEQ ID NO: 153 - protein, 23 aa, Artificial Sequence
  synthetic
QKLVFFAEDVGSNKGAIIGLMVG

SEQ ID NO: 154 - protein, 22 aa, Artificial Sequence
  synthetic
KLVFFAEDVGSNKGAIIGLMVG

SEQ ID NO: 155 - protein, 21 aa, Artificial Sequence
  synthetic
LVFFAEDVGSNKGAIIGLMVG

SEQ ID NO: 156 - protein, 20 aa, Artificial Sequence
  synthetic
VFFAEDVGSNKGAIIGLMVG

SEQ ID NO: 157 - protein, 19 aa, Artificial Sequence
  synthetic
FFAEDVGSNKGAIIGLMVG

SEQ ID NO: 158 - protein, 18 aa, Artificial Sequence
  synthetic
FAEDVGSNKGAIIGLMVG

SEQ ID NO: 159 - protein, 17 aa, Artificial Sequence
  synthetic
AEDVGSNKGAIIGLMVG

SEQ ID NO: 160 - protein, 16 aa, Artificial Sequence
  synthetic
EDVGSNKGAIIGLMVG

SEQ ID NO: 161 - protein, 15 aa, Artificial Sequence
  synthetic
DVGSNKGAIIGLMVG

SEQ ID NO: 162 - protein, 36 aa, Artificial Sequence
  synthetic
DAEFRHDSGYEVHHQKLVFFAEDVGSNKGAIIGLMV

SEQ ID NO: 163 - protein, 35 aa, Artificial Sequence
  synthetic
AEFRHDSGYEVHHQKLVFFAEDVGSNKGAIIGLMV

SEQ ID NO: 164 - protein, 34 aa, Artificial Sequence
  synthetic
EFRHDSGYEVHHQKLVFFAEDVGSNKGAIIGLMV

SEQ ID NO: 165 - protein, 33 aa, Artificial Sequence
  synthetic
FRHDSGYEVHHQKLVFFAEDVGSNKGAIIGLMV

SEQ ID NO: 166 - protein, 32 aa, Artificial Sequence
  synthetic
RHDSGYEVHHQKLVFFAEDVGSNKGAIIGLMV

SEQ ID NO: 167 - protein, 31 aa, Artificial Sequence
  synthetic
HDSGYEVHHQKLVFFAEDVGSNKGAIIGLMV

SEQ ID NO: 168 - protein, 30 aa, Artificial Sequence
  synthetic
DSGYEVHHQKLVFFAEDVGSNKGAIIGLMV

SEQ ID NO: 169 - protein, 29 aa, Artificial Sequence
  synthetic
SGYEVHHQKLVFFAEDVGSNKGAIIGLMV

SEQ ID NO: 170 - protein, 28 aa, Artificial Sequence
  synthetic
GYEVHHQKLVFFAEDVGSNKGAIIGLMV

SEQ ID NO: 171 - protein, 27 aa, Artificial Sequence
  synthetic
YEVHHQKLVFFAEDVGSNKGAIIGLMV

SEQ ID NO: 172 - protein, 26 aa, Artificial Sequence
  synthetic
EVHHQKLVFFAEDVGSNKGAIIGLMV

SEQ ID NO: 173 - protein, 25 aa, Artificial Sequence
  synthetic
VHHQKLVFFAEDVGSNKGAIIGLMV

SEQ ID NO: 174 - protein, 24 aa, Artificial Sequence
  synthetic
HHQKLVFFAEDVGSNKGAIIGLMV

SEQ ID NO: 175 - protein, 23 aa, Artificial Sequence
  synthetic
HQKLVFFAEDVGSNKGAIIGLMV

SEQ ID NO: 176 - protein, 22 aa, Artificial Sequence
  synthetic
QKLVFFAEDVGSNKGAIIGLMV

SEQ ID NO: 177 - protein, 21 aa, Artificial Sequence
  synthetic
KLVFFAEDVGSNKGAIIGLMV

SEQ ID NO: 178 - protein, 20 aa, Artificial Sequence
  synthetic
LVFFAEDVGSNKGAIIGLMV

SEQ ID NO: 179 - protein, 19 aa, Artificial Sequence
  synthetic
VFFAEDVGSNKGAIIGLMV

SEQ ID NO: 180 - protein, 18 aa, Artificial Sequence
  synthetic
FFAEDVGSNKGAIIGLMV

SEQ ID NO: 181 - protein, 17 aa, Artificial Sequence
  synthetic
FAEDVGSNKGAIIGLMV

SEQ ID NO: 182 - protein, 16 aa, Artificial Sequence
  synthetic
AEDVGSNKGAIIGLMV

SEQ ID NO: 183 - protein, 15 aa, Artificial Sequence
  synthetic
EDVGSNKGAIIGLMV

SEQ ID NO: 184 - protein, 14 aa, Artificial Sequence
  synthetic
DVGSNKGAIIGLMV

SEQ ID NO: 185 - protein, 35 aa, Artificial Sequence
  synthetic
DAEFRHDSGYEVHHQKLVFFAEDVGSNKGAIIGLM

SEQ ID NO: 186 - protein, 34 aa, Artificial Sequence
  synthetic
AEFRHDSGYEVHHQKLVFFAEDVGSNKGAIIGLM

SEQ ID NO: 187 - protein, 33 aa, Artificial Sequence
  synthetic
EFRHDSGYEVHHQKLVFFAEDVGSNKGAIIGLM

SEQ ID NO: 188 - protein, 32 aa, Artificial Sequence
  synthetic
FRHDSGYEVHHQKLVFFAEDVGSNKGAIIGLM

SEQ ID NO: 189 - protein, 31 aa, Artificial Sequence
  synthetic
RHDSGYEVHHQKLVFFAEDVGSNKGAIIGLM

SEQ ID NO: 190 - protein, 30 aa, Artificial Sequence
  synthetic
HDSGYEVHHQKLVFFAEDVGSNKGAIIGLM

SEQ ID NO: 191 - protein, 29 aa, Artificial Sequence
  synthetic
DSGYEVHHQKLVFFAEDVGSNKGAIIGLM

SEQ ID NO: 192 - protein, 28 aa, Artificial Sequence
  synthetic
SGYEVHHQKLVFFAEDVGSNKGAIIGLM

SEQ ID NO: 193 - protein, 27 aa, Artificial Sequence
  synthetic
GYEVHHQKLVFFAEDVGSNKGAIIGLM

SEQ ID NO: 194 - protein, 26 aa, Artificial Sequence
  synthetic
YEVHHQKLVFFAEDVGSNKGAIIGLM

SEQ ID NO: 195 - protein, 25 aa, Artificial Sequence
  synthetic
EVHHQKLVFFAEDVGSNKGAIIGLM

SEQ ID NO: 196 - protein, 24 aa, Artificial Sequence
  synthetic
VHHQKLVFFAEDVGSNKGAIIGLM

SEQ ID NO: 197 - protein, 23 aa, Artificial Sequence
  synthetic
HHQKLVFFAEDVGSNKGAIIGLM

SEQ ID NO: 198 - protein, 22 aa, Artificial Sequence
  synthetic
HQKLVFFAEDVGSNKGAIIGLM

SEQ ID NO: 199 - protein, 21 aa, Artificial Sequence
  synthetic
QKLVFFAEDVGSNKGAIIGLM

SEQ ID NO: 200 - protein, 20 aa, Artificial Sequence
  synthetic
KLVFFAEDVGSNKGAIIGLM

SEQ ID NO: 201 - protein, 19 aa, Artificial Sequence
  synthetic
LVFFAEDVGSNKGAIIGLM

SEQ ID NO: 202 - protein, 18 aa, Artificial Sequence
  synthetic
VFFAEDVGSNKGAIIGLM

SEQ ID NO: 203 - protein, 17 aa, Artificial Sequence
  synthetic
FFAEDVGSNKGAIIGLM

SEQ ID NO: 204 - protein, 16 aa, Artificial Sequence
  synthetic
FAEDVGSNKGAIIGLM

SEQ ID NO: 205 - protein, 15 aa, Artificial Sequence
  synthetic
AEDVGSNKGAIIGLM

SEQ ID NO: 206 - protein, 14 aa, Artificial Sequence
  synthetic
EDVGSNKGAIIGLM

SEQ ID NO: 207 - protein, 13 aa, Artificial Sequence
  synthetic
DVGSNKGAIIGLM

SEQ ID NO: 208 - protein, 34 aa, Artificial Sequence
  synthetic
DAEFRHDSGYEVHHQKLVFFAEDVGSNKGAIIGL

SEQ ID NO: 209 - protein, 33 aa, Artificial Sequence
  synthetic
AEFRHDSGYEVHHQKLVFFAEDVGSNKGAIIGL

SEQ ID NO: 210 - protein, 32 aa, Artificial Sequence
  synthetic
EFRHDSGYEVHHQKLVFFAEDVGSNKGAIIGL

SEQ ID NO: 211 - protein, 31 aa, Artificial Sequence
  synthetic
FRHDSGYEVHHQKLVFFAEDVGSNKGAIIGL

SEQ ID NO: 212 - protein, 30 aa, Artificial Sequence
  synthetic
RHDSGYEVHHQKLVFFAEDVGSNKGAIIGL

SEQ ID NO: 213 - protein, 29 aa, Artificial Sequence
  synthetic
HDSGYEVHHQKLVFFAEDVGSNKGAIIGL

SEQ ID NO: 214 - protein, 28 aa, Artificial Sequence
  synthetic
DSGYEVHHQKLVFFAEDVGSNKGAIIGL

SEQ ID NO: 215 - protein, 27 aa, Artificial Sequence
  synthetic
SGYEVHHQKLVFFAEDVGSNKGAIIGL

SEQ ID NO: 216 - protein, 26 aa, Artificial Sequence
  synthetic
GYEVHHQKLVFFAEDVGSNKGAIIGL

SEQ ID NO: 217 - protein, 25 aa, Artificial Sequence
  synthetic
YEVHHQKLVFFAEDVGSNKGAIIGL

SEQ ID NO: 218 - protein, 24 aa, Artificial Sequence
  synthetic
EVHHQKLVFFAEDVGSNKGAIIGL

SEQ ID NO: 219 - protein, 23 aa, Artificial Sequence
  synthetic
VHHQKLVFFAEDVGSNKGAIIGL

SEQ ID NO: 220 - protein, 22 aa, Artificial Sequence
  synthetic
HHQKLVFFAEDVGSNKGAIIGL

SEQ ID NO: 221 - protein, 21 aa, Artificial Sequence
  synthetic
HQKLVFFAEDVGSNKGAIIGL

SEQ ID NO: 222 - protein, 20 aa, Artificial Sequence
  synthetic
QKLVFFAEDVGSNKGAIIGL

SEQ ID NO: 223 - protein, 19 aa, Artificial Sequence
  synthetic
KLVFFAEDVGSNKGAIIGL

SEQ ID NO: 224 - protein, 18 aa, Artificial Sequence
  synthetic
LVFFAEDVGSNKGAIIGL

SEQ ID NO: 225 - protein, 17 aa, Artificial Sequence
  synthetic
VFFAEDVGSNKGAIIGL

SEQ ID NO: 226 - protein, 16 aa, Artificial Sequence
  synthetic
FFAEDVGSNKGAIIGL

SEQ ID NO: 227 - protein, 15 aa, Artificial Sequence
  synthetic
FAEDVGSNKGAIIGL

SEQ ID NO: 228 - protein, 14 aa, Artificial Sequence
  synthetic
AEDVGSNKGAIIGL

SEQ ID NO: 229 - protein, 13 aa, Artificial Sequence
  synthetic
EDVGSNKGAIIGL

SEQ ID NO: 230 - protein, 12 aa, Artificial Sequence
  synthetic
DVGSNKGAIIGL

SEQ ID NO: 231 - protein, 33 aa, Artificial Sequence
  synthetic
DAEFRHDSGYEVHHQKLVFFAEDVGSNKGAIIG

SEQ ID NO: 232 - protein, 32 aa, Artificial Sequence
  synthetic
AEFRHDSGYEVHHQKLVFFAEDVGSNKGAIIG

SEQ ID NO: 233 - protein, 31 aa, Artificial Sequence
  synthetic
EFRHDSGYEVHHQKLVFFAEDVGSNKGAIIG

SEQ ID NO: 234 - protein, 30 aa, Artificial Sequence
  synthetic
FRHDSGYEVHHQKLVFFAEDVGSNKGAIIG

SEQ ID NO: 235 - protein, 29 aa, Artificial Sequence
  synthetic
RHDSGYEVHHQKLVFFAEDVGSNKGAIIG

SEQ ID NO: 236 - protein, 28 aa, Artificial Sequence
  synthetic
HDSGYEVHHQKLVFFAEDVGSNKGAIIG

SEQ ID NO: 237 - protein, 27 aa, Artificial Sequence
  synthetic
DSGYEVHHQKLVFFAEDVGSNKGAIIG

SEQ ID NO: 238 - protein, 26 aa, Artificial Sequence
  synthetic
SGYEVHHQKLVFFAEDVGSNKGAIIG

SEQ ID NO: 239 - protein, 25 aa, Artificial Sequence
  synthetic
GYEVHHQKLVFFAEDVGSNKGAIIG

SEQ ID NO: 240 - protein, 24 aa, Artificial Sequence
  synthetic
YEVHHQKLVFFAEDVGSNKGAIIG

SEQ ID NO: 241 - protein, 23 aa, Artificial Sequence
  synthetic
EVHHQKLVFFAEDVGSNKGAIIG

SEQ ID NO: 242 - protein, 22 aa, Artificial Sequence
  synthetic
VHHQKLVFFAEDVGSNKGAIIG

SEQ ID NO: 243 - protein, 21 aa, Artificial Sequence
  synthetic
HHQKLVFFAEDVGSNKGAIIG

SEQ ID NO: 244 - protein, 20 aa, Artificial Sequence
  synthetic
HQKLVFFAEDVGSNKGAIIG

SEQ ID NO: 245 - protein, 19 aa, Artificial Sequence
  synthetic
QKLVFFAEDVGSNKGAIIG

SEQ ID NO: 246 - protein, 18 aa, Artificial Sequence
  synthetic
KLVFFAEDVGSNKGAIIG

SEQ ID NO: 247 - protein, 17 aa, Artificial Sequence
  synthetic
LVFFAEDVGSNKGAIIG

SEQ ID NO: 248 - protein, 16 aa, Artificial Sequence
  synthetic
VFFAEDVGSNKGAIIG

SEQ ID NO: 249 - protein, 15 aa, Artificial Sequence
  synthetic
FFAEDVGSNKGAIIG

SEQ ID NO: 250 - protein, 14 aa, Artificial Sequence
  synthetic
FAEDVGSNKGAIIG

SEQ ID NO: 251 - protein, 13 aa, Artificial Sequence
  synthetic
AEDVGSNKGAIIG

SEQ ID NO: 252 - protein, 12 aa, Artificial Sequence
  synthetic
EDVGSNKGAIIG

SEQ ID NO: 253 - protein, 11 aa, Artificial Sequence
  synthetic
DVGSNKGAIIG

SEQ ID NO: 254 - protein, 32 aa, Artificial Sequence
  synthetic
DAEFRHDSGYEVHHQKLVFFAEDVGSNKGAII

SEQ ID NO: 255 - protein, 31 aa, Artificial Sequence
  synthetic
AEFRHDSGYEVHHQKLVFFAEDVGSNKGAII

SEQ ID NO: 256 - protein, 30 aa, Artificial Sequence
  synthetic
EFRHDSGYEVHHQKLVFFAEDVGSNKGAII

SEQ ID NO: 257 - protein, 29 aa, Artificial Sequence
  synthetic
FRHDSGYEVHHQKLVFFAEDVGSNKGAII

SEQ ID NO: 258 - protein, 28 aa, Artificial Sequence
  synthetic
RHDSGYEVHHQKLVFFAEDVGSNKGAII

SEQ ID NO: 259 - protein, 27 aa, Artificial Sequence
  synthetic
HDSGYEVHHQKLVFFAEDVGSNKGAII

SEQ ID NO: 260 - protein, 26 aa, Artificial Sequence
  synthetic
DSGYEVHHQKLVFFAEDVGSNKGAII

SEQ ID NO: 261 - protein, 25 aa, Artificial Sequence
  synthetic
SGYEVHHQKLVFFAEDVGSNKGAII

SEQ ID NO: 262 - protein, 24 aa, Artificial Sequence
  synthetic
GYEVHHQKLVFFAEDVGSNKGAII

SEQ ID NO: 263 - protein, 23 aa, Artificial Sequence
  synthetic
YEVHHQKLVFFAEDVGSNKGAII

SEQ ID NO: 264 - protein, 22 aa, Artificial Sequence
  synthetic
EVHHQKLVFFAEDVGSNKGAII

SEQ ID NO: 265 - protein, 21 aa, Artificial Sequence
  synthetic
VHHQKLVFFAEDVGSNKGAII

SEQ ID NO: 266 - protein, 20 aa, Artificial Sequence
  synthetic
HHQKLVFFAEDVGSNKGAII

SEQ ID NO: 267 - protein, 19 aa, Artificial Sequence
  synthetic
HQKLVFFAEDVGSNKGAII

SEQ ID NO: 268 - protein, 18 aa, Artificial Sequence
  synthetic
QKLVFFAEDVGSNKGAII

SEQ ID NO: 269 - protein, 17 aa, Artificial Sequence
  synthetic
KLVFFAEDVGSNKGAII

SEQ ID NO: 270 - protein, 16 aa, Artificial Sequence
  synthetic
LVFFAEDVGSNKGAII

SEQ ID NO: 271 - protein, 15 aa, Artificial Sequence
  synthetic
VFFAEDVGSNKGAII

SEQ ID NO: 272 - protein, 14 aa, Artificial Sequence
  synthetic
FFAEDVGSNKGAII

SEQ ID NO: 273 - protein, 13 aa, Artificial Sequence
  synthetic
FAEDVGSNKGAII

SEQ ID NO: 274 - protein, 12 aa, Artificial Sequence
  synthetic
AEDVGSNKGAII

SEQ ID NO: 275 - protein, 11 aa, Artificial Sequence
  synthetic
EDVGSNKGAII

SEQ ID NO: 276 - protein, 10 aa, Artificial Sequence
  synthetic
DVGSNKGAII

SEQ ID NO: 277 - protein, 31 aa, Artificial Sequence
  synthetic
DAEFRHDSGYEVHHQKLVFFAEDVGSNKGAI

SEQ ID NO: 278 - protein, 30 aa, Artificial Sequence
  synthetic
AEFRHDSGYEVHHQKLVFFAEDVGSNKGAI

SEQ ID NO: 279 - protein, 29 aa, Artificial Sequence
  synthetic
EFRHDSGYEVHHQKLVFFAEDVGSNKGAI

SEQ ID NO: 280 - protein, 28 aa, Artificial Sequence
  synthetic
FRHDSGYEVHHQKLVFFAEDVGSNKGAI

SEQ ID NO: 281 - protein, 27 aa, Artificial Sequence
  synthetic
RHDSGYEVHHQKLVFFAEDVGSNKGAI

SEQ ID NO: 282 - protein, 26 aa, Artificial Sequence
  synthetic
HDSGYEVHHQKLVFFAEDVGSNKGAI

SEQ ID NO: 283 - protein, 25 aa, Artificial Sequence
  synthetic
DSGYEVHHQKLVFFAEDVGSNKGAI

SEQ ID NO: 284 - protein, 24 aa, Artificial Sequence
  synthetic
SGYEVHHQKLVFFAEDVGSNKGAI

SEQ ID NO: 285 - protein, 23 aa, Artificial Sequence
  synthetic
GYEVHHQKLVFFAEDVGSNKGAI

SEQ ID NO: 286 - protein, 22 aa, Artificial Sequence
  synthetic
YEVHHQKLVFFAEDVGSNKGAI

SEQ ID NO: 287 - protein, 21 aa, Artificial Sequence
  synthetic
EVHHQKLVFFAEDVGSNKGAI

SEQ ID NO: 288 - protein, 20 aa, Artificial Sequence
  synthetic
VHHQKLVFFAEDVGSNKGAI

SEQ ID NO: 289 - protein, 19 aa, Artificial Sequence
  synthetic
HHQKLVFFAEDVGSNKGAI

SEQ ID NO: 290 - protein, 18 aa, Artificial Sequence
  synthetic
HQKLVFFAEDVGSNKGAI

SEQ ID NO: 291 - protein, 17 aa, Artificial Sequence
  synthetic
QKLVFFAEDVGSNKGAI

SEQ ID NO: 292 - protein, 16 aa, Artificial Sequence
  synthetic
KLVFFAEDVGSNKGAI

SEQ ID NO: 293 - protein, 15 aa, Artificial Sequence
  synthetic
LVFFAEDVGSNKGAI

SEQ ID NO: 294 - protein, 14 aa, Artificial Sequence
  synthetic
VFFAEDVGSNKGAI

SEQ ID NO: 295 - protein, 13 aa, Artificial Sequence
  synthetic
FFAEDVGSNKGAI

SEQ ID NO: 296 - protein, 12 aa, Artificial Sequence
  synthetic
FAEDVGSNKGAI

SEQ ID NO: 297 - protein, 11 aa, Artificial Sequence
  synthetic
AEDVGSNKGAI

SEQ ID NO: 298 - protein, 10 aa, Artificial Sequence
  synthetic
EDVGSNKGAI

SEQ ID NO: 299 - protein, 9 aa, Artificial Sequence
  synthetic
DVGSNKGAI

SEQ ID NO: 300 - protein, 30 aa, Artificial Sequence
  synthetic
DAEFRHDSGYEVHHQKLVFFAEDVGSNKGA

SEQ ID NO: 301 - protein, 29 aa, Artificial Sequence
  synthetic
AEFRHDSGYEVHHQKLVFFAEDVGSNKGA

SEQ ID NO: 302 - protein, 28 aa, Artificial Sequence
  synthetic
EFRHDSGYEVHHQKLVFFAEDVGSNKGA

SEQ ID NO: 303 - protein, 27 aa, Artificial Sequence
  synthetic
FRHDSGYEVHHQKLVFFAEDVGSNKGA

SEQ ID NO: 304 - protein, 26 aa, Artificial Sequence
  synthetic
RHDSGYEVHHQKLVFFAEDVGSNKGA

SEQ ID NO: 305 - protein, 25 aa, Artificial Sequence
  synthetic
HDSGYEVHHQKLVFFAEDVGSNKGA

SEQ ID NO: 306 - protein, 24 aa, Artificial Sequence
  synthetic
DSGYEVHHQKLVFFAEDVGSNKGA

SEQ ID NO: 307 - protein, 23 aa, Artificial Sequence
  synthetic
SGYEVHHQKLVFFAEDVGSNKGA

SEQ ID NO: 308 - protein, 22 aa, Artificial Sequence
  synthetic
GYEVHHQKLVFFAEDVGSNKGA

SEQ ID NO: 309 - protein, 21 aa, Artificial Sequence
  synthetic
YEVHHQKLVFFAEDVGSNKGA

SEQ ID NO: 310 - protein, 20 aa, Artificial Sequence
  synthetic
EVHHQKLVFFAEDVGSNKGA

SEQ ID NO: 311 - protein, 19 aa, Artificial Sequence
  synthetic
VHHQKLVFFAEDVGSNKGA

SEQ ID NO: 312 - protein, 18 aa, Artificial Sequence
  synthetic
HHQKLVFFAEDVGSNKGA

SEQ ID NO: 313 - protein, 17 aa, Artificial Sequence
  synthetic
HQKLVFFAEDVGSNKGA

SEQ ID NO: 314 - protein, 16 aa, Artificial Sequence
  synthetic
QKLVFFAEDVGSNKGA

SEQ ID NO: 315 - protein, 15 aa, Artificial Sequence
  synthetic
KLVFFAEDVGSNKGA

SEQ ID NO: 316 - protein, 14 aa, Artificial Sequence
  synthetic
LVFFAEDVGSNKGA

SEQ ID NO: 317 - protein, 13 aa, Artificial Sequence
  synthetic
VFFAEDVGSNKGA

SEQ ID NO: 318 - protein, 12 aa, Artificial Sequence
  synthetic
FFAEDVGSNKGA

SEQ ID NO: 319 - protein, 11 aa, Artificial Sequence
  synthetic
FAEDVGSNKGA

SEQ ID NO: 320 - protein, 10 aa, Artificial Sequence
  synthetic
AEDVGSNKGA

SEQ ID NO: 321 - protein, 9 aa, Artificial Sequence
  synthetic
EDVGSNKGA

SEQ ID NO: 322 - protein, 8 aa, Artificial Sequence
  synthetic
DVGSNKGA

SEQ ID NO: 323 - protein, 29 aa, Artificial Sequence
  synthetic
DAEFRHDSGYEVHHQKLVFFAEDVGSNKG

SEQ ID NO: 324 - protein, 28 aa, Artificial Sequence
  synthetic
AEFRHDSGYEVHHQKLVFFAEDVGSNKG

SEQ ID NO: 325 - protein, 27 aa, Artificial Sequence
  synthetic
EFRHDSGYEVHHQKLVFFAEDVGSNKG

SEQ ID NO: 326 - protein, 26 aa, Artificial Sequence
  synthetic
FRHDSGYEVHHQKLVFFAEDVGSNKG

SEQ ID NO: 327 - protein, 25 aa, Artificial Sequence
  synthetic
RHDSGYEVHHQKLVFFAEDVGSNKG

SEQ ID NO: 328 - protein, 24 aa, Artificial Sequence
  synthetic
HDSGYEVHHQKLVFFAEDVGSNKG

SEQ ID NO: 329 - protein, 23 aa, Artificial Sequence
  synthetic
DSGYEVHHQKLVFFAEDVGSNKG

SEQ ID NO: 330 - protein, 22 aa, Artificial Sequence
  synthetic
SGYEVHHQKLVFFAEDVGSNKG

SEQ ID NO: 331 - protein, 21 aa, Artificial Sequence
  synthetic
GYEVHHQKLVFFAEDVGSNKG

SEQ ID NO: 332 - protein, 20 aa, Artificial Sequence
  synthetic
YEVHHQKLVFFAEDVGSNKG

SEQ ID NO: 333 - protein, 19 aa, Artificial Sequence
  synthetic
EVHHQKLVFFAEDVGSNKG

SEQ ID NO: 334 - protein, 18 aa, Artificial Sequence
  synthetic
VHHQKLVFFAEDVGSNKG

SEQ ID NO: 335 - protein, 17 aa, Artificial Sequence
  synthetic
HHQKLVFFAEDVGSNKG

SEQ ID NO: 336 - protein, 16 aa, Artificial Sequence
  synthetic
HQKLVFFAEDVGSNKG

SEQ ID NO: 337 - protein, 15 aa, Artificial Sequence
  synthetic
QKLVFFAEDVGSNKG

SEQ ID NO: 338 - protein, 14 aa, Artificial Sequence
  synthetic
KLVFFAEDVGSNKG

SEQ ID NO: 339 - protein, 13 aa, Artificial Sequence
  synthetic
LVFFAEDVGSNKG

SEQ ID NO: 340 - protein, 12 aa, Artificial Sequence
  synthetic
VFFAEDVGSNKG

SEQ ID NO: 341 - protein, 11 aa, Artificial Sequence
  synthetic
FFAEDVGSNKG

SEQ ID NO: 342 - protein, 10 aa, Artificial Sequence
  synthetic
FAEDVGSNKG

SEQ ID NO: 343 - protein, 9 aa, Artificial Sequence
  synthetic
AEDVGSNKG

SEQ ID NO: 344 - protein, 8 aa, Artificial Sequence
  synthetic
EDVGSNKG

SEQ ID NO: 345 - protein, 7 aa, Artificial Sequence
  synthetic
DVGSNKG

SEQ ID NO: 346 - protein, 28 aa, Artificial Sequence
  synthetic
DAEFRHDSGYEVHHQKLVFFAEDVGSNK

SEQ ID NO: 347 - protein, 27 aa, Artificial Sequence
  synthetic
AEFRHDSGYEVHHQKLVFFAEDVGSNK

SEQ ID NO: 348 - protein, 26 aa, Artificial Sequence
  synthetic
EFRHDSGYEVHHQKLVFFAEDVGSNK

SEQ ID NO: 349 - protein, 25 aa, Artificial Sequence
  synthetic
FRHDSGYEVHHQKLVFFAEDVGSNK

SEQ ID NO: 350 - protein, 24 aa, Artificial Sequence
  synthetic
RHDSGYEVHHQKLVFFAEDVGSNK

SEQ ID NO: 351 - protein, 23 aa, Artificial Sequence
  synthetic
HDSGYEVHHQKLVFFAEDVGSNK

SEQ ID NO: 352 - protein, 22 aa, Artificial Sequence
  synthetic
DSGYEVHHQKLVFFAEDVGSNK

SEQ ID NO: 353 - protein, 21 aa, Artificial Sequence
  synthetic
SGYEVHHQKLVFFAEDVGSNK

SEQ ID NO: 354 - protein, 20 aa, Artificial Sequence
  synthetic
GYEVHHQKLVFFAEDVGSNK

SEQ ID NO: 355 - protein, 19 aa, Artificial Sequence
  synthetic
YEVHHQKLVFFAEDVGSNK

SEQ ID NO: 356 - protein, 18 aa, Artificial Sequence
  synthetic
EVHHQKLVFFAEDVGSNK

SEQ ID NO: 357 - protein, 17 aa, Artificial Sequence
  synthetic
VHHQKLVFFAEDVGSNK

SEQ ID NO: 358 - protein, 16 aa, Artificial Sequence
  synthetic
HHQKLVFFAEDVGSNK

SEQ ID NO: 359 - protein, 15 aa, Artificial Sequence
  synthetic
HQKLVFFAEDVGSNK

SEQ ID NO: 360 - protein, 14 aa, Artificial Sequence
  synthetic
QKLVFFAEDVGSNK

SEQ ID NO: 361 - protein, 13 aa, Artificial Sequence
  synthetic
KLVFFAEDVGSNK

SEQ ID NO: 362 - protein, 12 aa, Artificial Sequence
  synthetic
LVFFAEDVGSNK

SEQ ID NO: 363 - protein, 11 aa, Artificial Sequence
  synthetic
VFFAEDVGSNK

SEQ ID NO: 364 - protein, 10 aa, Artificial Sequence
  synthetic
FFAEDVGSNK

SEQ ID NO: 365 - protein, 9 aa, Artificial Sequence
  synthetic
FAEDVGSNK

SEQ ID NO: 366 - protein, 8 aa, Artificial Sequence
  synthetic
AEDVGSNK

SEQ ID NO: 367 - protein, 7 aa, Artificial Sequence
  synthetic
EDVGSNK

SEQ ID NO: 368 - protein, 6 aa, Artificial Sequence
  synthetic
DVGSNK

SEQ ID NO: 369 - protein, 43 aa, Artificial Sequence
  synthetic
  MISC_FEATURE (12)..(12): Xaa is valine, leucine, isoleucine, alanine, methionine, or an amino acid residue which is covalently linked to another amino acid residue of the sequence
  MISC_FEATURE (13)..(13): Xaa is histidine, tyrosine, serine, methionine, or an amino acid residue which is covalently linked to another amino acid residue of the sequence
  MISC_FEATURE (14)..(14): Xaa is histidine, tyrosine, serine, methionine, or an amino acid residue which is covalently linked to another amino acid residue of the sequence
  MISC_FEATURE (15)..(15): Xaa is glutamine, asparagine, methionine, serine, or an amino acid which is covalently linked to another amino acid residue of the sequence
  MISC_FEATURE (16)..(16): Xaa is lysine, arginine, or an amino acid residue which is covalently linked to another amino acid residue of the sequence
  MISC_FEATURE (17)..(17): Xaa is leucine, isoleucine, valine, phenylalanine, methionine, or an amino acid residue which is covalently linked to another amino acid residue of the sequence
  MISC_FEATURE (18)..(18): Xaa is valine, leucine, isoleucine, alanine, methionine, or an amino acid residue which is covalently linked to another amino acid residue of the sequence
  MISC_FEATURE (19)..(19): Xaa is phenylalanine, tyrosine, valine, leucine, isoleucine, methionine, or an amino acid residue which is covalently linked to another amino acid residue of the sequence
  MISC_FEATURE (20)..(20): Xaa is phenylalanine, tyrosine, valine, leucine, isoleucine, methionine, or an amino acid residue which is covalently linked to another amino acid residue of the sequence
  MISC_FEATURE (21)..(21): Xaa is alanine, valine, glycine, serine, or an amino acid residue which is covalently linked to another amino acid residue of the sequence
  MISC_FEATURE (22)..(22): Xaa is glutamic acid, aspartic acid, or an amino acid residue which is covalently linked to another amino acid residue of the sequence
  MISC_FEATURE (29)..(29): Xaa is glycine, alanine, serine, or an amino acid residue which is covalently linked to another amino acid residue of the sequence
  MISC_FEATURE (30)..(30): Xaa is alanine, valine, glycine, serine, or an amino acid residue which is covalently linked to another amino acid residue of the sequence
  MISC_FEATURE (31)..(31): Xaa is isoleucine, leucine, valine, phenylalanine, methionine, or an amino acid residue which is covalently linked to another amino acid residue of the sequence
  MISC_FEATURE (32)..(32): Xaa is isoleucine, leucine, valine, phenylalanine, methionine, or an amino acid residue which is covalently linked to another amino acid residue of the sequence
  MISC_FEATURE (33)..(33): Xaa is glycine, alanine, serine, or an amino acid residue which is covalently linked to another amino acid residue of the sequence
  MISC_FEATURE (34)..(34): Xaa is leucine, isoleucine, valine, phenylalanine, methionine, or an amino acid residue which is covalently linked to another amino acid residue of the sequence
  MISC_FEATURE (35)..(35): Xaa is methionine, valine, leucine, isoleucine, alanine, or an amino acid residue which is covalently linked to another amino acid residue of the sequence
  MISC_FEATURE (36)..(36): Xaa is valine, leucine, isoleucine, alanine, methionine, or an amino acid residue which is covalently linked to another amino acid residue of the sequence
  MISC_FEATURE (37)..(37): Xaa is glycine, alanine, serine, or an amino acid residue which is covalently linked to another amino acid residue of the sequence
  MISC_FEATURE (38)..(38): Xaa is glycine, alanine, serine, or an amino acid residue which is covalently linked to another amino acid residue of the sequence
  MISC_FEATURE (39)..(39): Xaa is valine, leucine, isoleucine, alanine, methionine, or an amino acid residue which is covalently linked to another amino acid residue of the sequence
DAEFRHDSGYEXXXXXXXXXXXDVGSNKXXXXXXXXXXXVIAT

SEQ ID NO: 370 - protein, 42 aa, Artificial Sequence
  synthetic
  MISC_FEATURE (11)..(11): Xaa is valine, leucine, isoleucine, alanine, methionine, or an amino acid residue which is covalently linked to another amino acid residue of the sequence
  MISC_FEATURE (12)..(12): Xaa is histidine, tyrosine, serine, methionine, or an amino acid residue which is covalently linked to another amino acid residue of the sequence
  MISC_FEATURE (13)..(13): Xaa is histidine, tyrosine, serine, methionine, or an amino acid residue which is covalently linked to another amino acid residue of the sequence
  MISC_FEATURE (14)..(14): Xaa is glutamine, asparagine, methionine, serine, or an amino acid which is covalently linked to another amino acid residue of the sequence
  MISC_FEATURE (15)..(15): Xaa is lysine, arginine, or an amino acid residue which is covalently linked to another amino acid residue of the sequence
  MISC_FEATURE (16)..(16): Xaa is leucine, isoleucine, valine, phenylalanine, methionine, or an amino acid residue which is covalently linked to another amino acid residue of the sequence
  MISC_FEATURE (17)..(17): Xaa is valine, leucine, isoleucine, alanine, methionine, or an amino acid residue which is covalently linked to another amino acid residue of the sequence
  MISC_FEATURE (18)..(18): Xaa is phenylalanine, tyrosine, valine, leucine, isoleucine, methionine, or an amino acid residue which is covalently linked to another amino acid residue of the sequence
  MISC_FEATURE (19)..(19): Xaa is phenylalanine, tyrosine, valine, leucine, isoleucine, methionine, or an amino acid residue which is covalently linked to another amino acid residue of the sequence
  MISC_FEATURE (20)..(20): Xaa is alanine, valine, glycine, serine, or an amino acid residue which is covalently linked to another amino acid residue of the sequence
  MISC_FEATURE (21)..(21): Xaa is glutamic acid, aspartic acid, or an amino acid residue which is covalently linked to another amino acid residue of the sequence
  MISC_FEATURE (28)..(28): Xaa is glycine, alanine, serine, or an amino acid residue which is covalently linked to another amino acid residue of the sequence
  MISC_FEATURE (29)..(29): Xaa is alanine, valine, glycine, serine, or an amino acid residue which is covalently linked to another amino acid residue of the sequence
  MISC_FEATURE (30)..(30): Xaa is isoleucine, leucine, valine, phenylalanine, methionine, or an amino acid residue which is covalently linked to another amino acid residue of the sequence
  MISC_FEATURE (31)..(31): Xaa is isoleucine, leucine, valine, phenylalanine, methionine, or an amino acid residue which is covalently linked to another amino acid residue of the sequence
  MISC_FEATURE (32)..(32): Xaa is glycine, alanine, serine, or an amino acid residue which is covalently linked to another amino acid residue of the sequence
  MISC_FEATURE (33)..(33): Xaa is leucine, isoleucine, valine, phenylalanine, methionine, or an amino acid residue which is covalently linked to another amino acid residue of the sequence
  MISC_FEATURE (34)..(34): Xaa is methionine, valine, leucine, isoleucine, alanine, or an amino acid residue which is covalently linked to another amino acid residue of the sequence
  MISC_FEATURE (35)..(35): Xaa is valine, leucine, isoleucine, alanine, methionine, or an amino acid residue which is covalently linked to another amino acid residue of the sequence
  MISC_FEATURE (36)..(36): Xaa is glycine, alanine, serine, or an amino acid residue which is covalently linked to another amino acid residue of the sequence
  MISC_FEATURE (37)..(37): Xaa is glycine, alanine, serine, or an amino acid residue which is covalently linked to another amino acid residue of the sequence
  MISC_FEATURE (38)..(38): Xaa is valine, leucine, isoleucine, alanine, methionine, or an amino acid residue which is covalently linked to another amino acid residue of the sequence
AEFRHDSGYEXXXXXXXXXXXDVGSNKXXXXXXXXXXXVIAT

SEQ ID NO: 371 - protein, 41 aa, Artificial Sequence
  synthetic
  MISC_FEATURE (10)..(10): Xaa is valine, leucine, isoleucine, alanine, methionine, or an amino acid residue which is covalently linked to another amino acid residue of the sequence
  MISC_FEATURE (11)..(11): Xaa is histidine, tyrosine, serine, methionine, or an amino acid residue which is covalently linked to another amino acid residue of the sequence
  MISC_FEATURE (12)..(12): Xaa is histidine, tyrosine, serine, methionine, or an amino acid residue which is covalently linked to another amino acid residue of the sequence
  MISC_FEATURE (13)..(13): Xaa is glutamine, asparagine, methionine, serine, or an amino acid which is covalently linked to another amino acid residue of the sequence
  MISC_FEATURE (14)..(14): Xaa is lysine, arginine, or an amino acid residue which is covalently linked to another amino acid residue of the sequence
  MISC_FEATURE (15)..(15): Xaa is leucine, isoleucine, valine, phenylalanine, methionine, or an amino acid residue which is covalently linked to another amino acid residue of the sequence
  MISC_FEATURE (16)..(16): Xaa is valine, leucine, isoleucine, alanine, methionine, or an amino acid residue which is covalently linked to another amino acid residue of the sequence
  MISC_FEATURE (17)..(17): Xaa is phenylalanine, tyrosine, valine, leucine, isoleucine, methionine, or an amino acid residue which is covalently linked to another amino acid residue of the sequence
  MISC_FEATURE (18)..(18): Xaa is phenylalanine, tyrosine, valine, leucine, isoleucine, methionine, or an amino acid residue which is covalently linked to another amino acid residue of the sequence
  MISC_FEATURE (19)..(19): Xaa is alanine, valine, glycine, serine, or an amino acid residue which is covalently linked to another amino acid residue of the sequence
  MISC_FEATURE (20)..(20): Xaa is glutamic acid, aspartic acid, or an amino acid residue which is covalently linked to another amino acid residue of the sequence
  MISC_FEATURE (27)..(27): Xaa is glycine, alanine, serine, or an amino acid residue which is covalently linked to another amino acid residue of the sequence
  MISC_FEATURE (28)..(28): Xaa is alanine, valine, glycine, serine, or an amino acid residue which is covalently linked to another amino acid residue of the sequence
  MISC_FEATURE (29)..(29): Xaa is isoleucine, leucine, valine, phenylalanine, methionine, or an amino acid residue which is covalently linked to another amino acid residue of the sequence
  MISC_FEATURE (30)..(30): Xaa is isoleucine, leucine, valine, phenylalanine, methionine, or an amino acid residue which is covalently linked to another amino acid residue of the sequence
  MISC_FEATURE (31)..(31): Xaa is glycine, alanine, serine, or an amino acid residue which is covalently linked to another amino acid residue of the sequence
  MISC_FEATURE (32)..(32): Xaa is leucine, isoleucine, valine, phenylalanine, methionine, or an amino acid residue which is covalently linked to another amino acid residue of the sequence
  MISC_FEATURE (33)..(33): Xaa is methionine, valine, leucine, isoleucine, alanine, or an amino acid residue which is covalently linked to another amino acid residue of the sequence
  MISC_FEATURE (34)..(34): Xaa is valine, leucine, isoleucine, alanine, methionine, or an amino acid residue which is covalently linked to another amino acid residue of the sequence
  MISC_FEATURE (35)..(35): Xaa is glycine, alanine, serine, or an amino acid residue which is covalently linked to another amino acid residue of the sequence
  MISC_FEATURE (36)..(36): Xaa is glycine, alanine, serine, or an amino acid residue which is covalently linked to another amino acid residue of the sequence
  MISC_FEATURE (37)..(37): Xaa is valine, leucine, isoleucine, alanine, methionine, or an amino acid residue which is covalently linked to another amino acid residue of the sequence
EFRHDSGYEXXXXXXXXXXXDVGSNKXXXXXXXXXXXVIAT

SEQ ID NO: 372 - protein, 40 aa, Artificial Sequence
  synthetic
  MISC_FEATURE (9)..(9): Xaa is valine, leucine, isoleucine, alanine, methionine, or an amino acid residue which is covalently linked to another amino acid residue of the sequence
  MISC_FEATURE (10)..(10): Xaa is histidine, tyrosine, serine, methionine, or an amino acid residue which is covalently linked to another amino acid residue of the sequence
  MISC_FEATURE (11)..(11): Xaa is histidine, tyrosine, serine, methionine, or an amino acid residue which is covalently linked to another amino acid residue of the sequence
  MISC_FEATURE (12)..(12): Xaa is glutamine, asparagine, methionine, serine, or an amino acid which is covalently linked to another amino acid residue of the sequence
  MISC_FEATURE (13)..(13): Xaa is lysine, arginine, or an amino acid residue which is covalently linked to another amino acid residue of the sequence
  MISC_FEATURE (14)..(14): Xaa is leucine, isoleucine, valine, phenylalanine, methionine, or an amino acid residue which is covalently linked to another amino acid residue of the sequence
  MISC_FEATURE (15)..(15): Xaa is valine, leucine, isoleucine, alanine, methionine, or an amino acid residue which is covalently linked to another amino acid residue of the sequence
  MISC_FEATURE (16)..(16): Xaa is phenylalanine, tyrosine, valine, leucine, isoleucine, methionine, or an amino acid residue which is covalently linked to another amino acid residue of the sequence
  MISC_FEATURE (17)..(17): Xaa is phenylalanine, tyrosine, valine, leucine, isoleucine, methionine, or an amino acid residue which is covalently linked to another amino acid residue of the sequence
  MISC_FEATURE (18)..(18): Xaa is alanine, valine, glycine, serine, or an amino acid residue which is covalently linked to another amino acid residue of the sequence
  MISC_FEATURE (19)..(19): Xaa is glutamic acid, aspartic acid, or an amino acid residue which is covalently linked to another amino acid residue of the sequence
  MISC_FEATURE (26)..(26): Xaa is glycine, alanine, serine, or an amino acid residue which is covalently linked to another amino acid residue of the sequence
  MISC_FEATURE (27)..(27): Xaa is alanine, valine, glycine, serine, or an amino acid residue which is covalently linked to another amino acid residue of the sequence
  MISC_FEATURE (28)..(28): Xaa is isoleucine, leucine, valine, phenylalanine, methionine, or an amino acid residue which is covalently linked to another amino acid residue of the sequence
  MISC_FEATURE (29)..(29): Xaa is isoleucine, leucine, valine, phenylalanine, methionine, or an amino acid residue which is covalently linked to another amino acid residue of the sequence
  MISC_FEATURE (30)..(30): Xaa is glycine, alanine, serine, or an amino acid residue which is covalently linked to another amino acid residue of the sequence
  MISC_FEATURE (31)..(31): Xaa is leucine, isoleucine, valine, phenylalanine, methionine, or an amino acid residue which is covalently linked to another amino acid residue of the sequence
  MISC_FEATURE (32)..(32): Xaa is methionine, valine, leucine, isoleucine, alanine, or an amino acid residue which is covalently linked to another amino acid residue of the sequence
  MISC_FEATURE (33)..(33): Xaa is valine, leucine, isoleucine, alanine, methionine, or an amino acid residue which is covalently linked to another amino acid residue of the sequence
  MISC_FEATURE (34)..(34): Xaa is glycine, alanine, serine, or an amino acid residue which is covalently linked to another amino acid residue of the sequence
  MISC_FEATURE (35)..(35): Xaa is glycine, alanine, serine, or an amino acid residue which is covalently linked to another amino acid residue of the sequence
  MISC_FEATURE (36)..(36): Xaa is valine, leucine, isoleucine, alanine, methionine, or an amino acid residue which is covalently linked to another amino acid residue of the sequence
FRHDSGYEXXXXXXXXXXXDVGSNKXXXXXXXXXXXVIAT

SEQ ID NO: 373 - protein, 39 aa, Artificial Sequence
  synthetic
  MISC_FEATURE (8)..(8): Xaa is valine, leucine, isoleucine, alanine, methionine, or an amino acid residue which is covalently linked to another amino acid residue of the sequence
  MISC_FEATURE (9)..(9): Xaa is histidine, tyrosine, serine, methionine, or an amino acid residue which is covalently linked to another amino acid residue of the sequence
  MISC_FEATURE (10)..(10): Xaa is histidine, tyrosine, serine, methionine, or an amino acid residue which is covalently linked to another amino acid residue of the sequence
  MISC_FEATURE (11)..(11): Xaa is glutamine, asparagine, methionine, serine, or an amino acid which is covalently linked to another amino acid residue of the sequence
  MISC_FEATURE (12)..(12): Xaa is lysine, arginine, or an amino acid residue which is covalently linked to another amino acid residue of the sequence
  MISC_FEATURE (13)..(13): Xaa is leucine, isoleucine, valine, phenylalanine, methionine, or an amino acid residue which is covalently linked to another amino acid residue of the sequence
  MISC_FEATURE (14)..(14): Xaa is valine, leucine, isoleucine, alanine, methionine, or an amino acid residue which is covalently linked to another amino acid residue of the sequence
  MISC_FEATURE (15)..(15): Xaa is phenylalanine, tyrosine, valine, leucine, isoleucine, methionine, or an amino acid residue which is covalently linked to another amino acid residue of the sequence
  MISC_FEATURE (16)..(16): Xaa is phenylalanine, tyrosine, valine, leucine, isoleucine, methionine, or an amino acid residue which is covalently linked to another amino acid residue of the sequence
  MISC_FEATURE (17)..(17): Xaa is alanine, valine, glycine, serine, or an amino acid residue which is covalently linked to another amino acid residue of the sequence
  MISC_FEATURE (18)..(18): Xaa is glutamic acid, aspartic acid, or an amino acid residue which is covalently linked to another amino acid residue of the sequence
  MISC_FEATURE (25)..(25): Xaa is glycine, alanine, serine, or an amino acid residue which is covalently linked to another amino acid residue of the sequence
  MISC_FEATURE (26)..(26): Xaa is alanine, valine, glycine, serine, or an amino acid residue which is covalently linked to another amino acid residue of the sequence
  MISC_FEATURE (27)..(27): Xaa is isoleucine, leucine, valine, phenylalanine, methionine, or an amino acid residue which is covalently linked to another amino acid residue of the sequence
  MISC_FEATURE (28)..(28): Xaa is isoleucine, leucine, valine, phenylalanine, methionine, or an amino acid residue which is covalently linked to another amino acid residue of the sequence
  MISC_FEATURE (29)..(29): Xaa is glycine, alanine, serine, or an amino acid residue which is covalently linked to another amino acid residue of the sequence
  MISC_FEATURE (30)..(30): Xaa is leucine, isoleucine, valine, phenylalanine, methionine, or an amino acid residue which is covalently linked to another amino acid residue of the sequence
  MISC_FEATURE (31)..(31): Xaa is methionine, valine, leucine, isoleucine, alanine, or an amino acid residue which is covalently linked to another amino acid residue of the sequence
  MISC_FEATURE (32)..(32): Xaa is valine, leucine, isoleucine, alanine, methionine, or an amino acid residue which is covalently linked to another amino acid residue of the sequence
  MISC_FEATURE (33)..(33): Xaa is glycine, alanine, serine, or an amino acid residue which is covalently linked to another amino acid residue of the sequence
  MISC_FEATURE (34)..(34): Xaa is glycine, alanine, serine, or an amino acid residue which is covalently linked to another amino acid residue of the sequence
  MISC_FEATURE (35)..(35): Xaa is valine, leucine, isoleucine, alanine, methionine, or an amino acid residue which is covalently linked to another amino acid residue of the sequence
RHDSGYEXXXXXXXXXXXDVGSNKXXXXXXXXXXXVIAT

SEQ ID NO: 374 - protein, 38 aa, Artificial Sequence
  synthetic
  MISC_FEATURE (7)..(7): Xaa is valine, leucine, isoleucine, alanine, methionine, or an amino acid residue which is covalently linked to another amino acid residue of the sequence
  MISC_FEATURE (8)..(8): Xaa is histidine, tyrosine, serine, methionine, or an amino acid residue which is covalently linked to another amino acid residue of the sequence
  MISC_FEATURE (9)..(9): Xaa is histidine, tyrosine, serine, methionine, or an amino acid residue which is covalently linked to another amino acid residue of the sequence
  MISC_FEATURE (10)..(10): Xaa is glutamine, asparagine, methionine, serine, or an amino acid which is covalently linked to another amino acid residue of the sequence
  MISC_FEATURE (11)..(11): Xaa is lysine, arginine, or an amino acid residue which is covalently linked to another amino acid residue of the sequence
  MISC_FEATURE (12)..(12): Xaa is leucine, isoleucine, valine, phenylalanine, methionine, or an amino acid residue which is covalently linked to another amino acid residue of the sequence
  MISC_FEATURE (13)..(13): Xaa is valine, leucine, isoleucine, alanine, methionine, or an amino acid residue which is covalently linked to another amino acid residue of the sequence
  MISC_FEATURE (14)..(14): Xaa is phenylalanine, tyrosine, valine, leucine, isoleucine, methionine, or an amino acid residue which is covalently linked to another amino acid residue of the sequence
  MISC_FEATURE (15)..(15): Xaa is phenylalanine, tyrosine, valine, leucine, isoleucine, methionine, or an amino acid residue which is covalently linked to another amino acid residue of the sequence
  MISC_FEATURE (16)..(16): Xaa is alanine, valine, glycine, serine, or an amino acid residue which is covalently linked to another amino acid residue of the sequence
  MISC_FEATURE (17)..(17): Xaa is glutamic acid, aspartic acid, or an amino acid residue which is covalently linked to another amino acid residue of the sequence
  MISC_FEATURE (24)..(24): Xaa is glycine, alanine, serine, or an amino acid residue which is covalently linked to another amino acid residue of the sequence
  MISC_FEATURE (25)..(25): Xaa is alanine, valine, glycine, serine, or an amino acid residue which is covalently linked to another amino acid residue of the sequence
  MISC_FEATURE (26)..(26): Xaa is isoleucine, leucine, valine, phenylalanine, methionine, or an amino acid residue which is covalently linked to another amino acid residue of the sequence
  MISC_FEATURE (27)..(27): Xaa is isoleucine, leucine, valine, phenylalanine, methionine, or an amino acid residue which is covalently linked to another amino acid residue of the sequence
  MISC_FEATURE (28)..(28): Xaa is glycine, alanine, serine, or an amino acid residue which is covalently linked to another amino acid residue of the sequence
  MISC_FEATURE (29)..(29): Xaa is leucine, isoleucine, valine, phenylalanine, methionine, or an amino acid residue which is covalently linked to another amino acid residue of the sequence
  MISC_FEATURE (30)..(30): Xaa is methionine, valine, leucine, isoleucine, alanine, or an amino acid residue which is covalently linked to another amino acid residue of the sequence
  MISC_FEATURE (31)..(31): Xaa is valine, leucine, isoleucine, alanine, methionine, or an amino acid residue which is covalently linked to another amino acid residue of the sequence
  MISC_FEATURE (32)..(32): Xaa is glycine, alanine, serine, or an amino acid residue which is covalently linked to another amino acid residue of the sequence
  MISC_FEATURE (33)..(33): Xaa is glycine, alanine, serine, or an amino acid residue which is covalently linked to another amino acid residue of the sequence
  MISC_FEATURE (34)..(34): Xaa is valine, leucine, isoleucine, alanine, methionine, or an amino acid residue which is covalently linked to another amino acid residue of the sequence
HDSGYEXXXXXXXXXXXDVGSNKXXXXXXXXXXXVIAT

SEQ ID NO: 375 - protein, 37 aa, Artificial Sequence
  synthetic
  MISC_FEATURE (6)..(6): Xaa is valine, leucine, isoleucine, alanine, methionine, or an amino acid residue which is covalently linked to another amino acid residue of the sequence
  MISC_FEATURE (7)..(7): Xaa is histidine, tyrosine, serine, methionine, or an amino acid residue which is covalently linked to another amino acid residue of the sequence
  MISC_FEATURE (8)..(8): Xaa is histidine, tyrosine, serine, methionine, or an amino acid residue which is covalently linked to another amino acid residue of the sequence
  MISC_FEATURE (9)..(9): Xaa is glutamine, asparagine, methionine, serine, or an amino acid which is covalently linked to another amino acid residue of the sequence
  MISC_FEATURE (10)..(10): Xaa is lysine, arginine, or an amino acid residue which is covalently linked to another amino acid residue of the sequence
  MISC_FEATURE (11)..(11): Xaa is leucine, isoleucine, valine, phenylalanine, methionine, or an amino acid residue which is covalently linked to another amino acid residue of the sequence
  MISC_FEATURE (12)..(12): Xaa is valine, leucine, isoleucine, alanine, methionine, or an amino acid residue which is covalently linked to another amino acid residue of the sequence
  MISC_FEATURE (13)..(13): Xaa is phenylalanine, tyrosine, valine, leucine, isoleucine, methionine, or an amino acid residue which is covalently linked to another amino acid residue of the sequence
  MISC_FEATURE (14)..(14): Xaa is phenylalanine, tyrosine, valine, leucine, isoleucine, methionine, or an amino acid residue which is covalently linked to another amino acid residue of the sequence
  MISC_FEATURE (15)..(15): Xaa is alanine, valine, glycine, serine, or an amino acid residue which is covalently linked to another amino acid residue of the sequence
  MISC_FEATURE (16)..(16): Xaa is glutamic acid, aspartic acid, or an amino acid residue which is covalently linked to another amino acid residue of the sequence
  MISC_FEATURE (23)..(23): Xaa is glycine, alanine, serine, or an amino acid residue which is covalently linked to another amino acid residue of the sequence
  MISC_FEATURE (24)..(24): Xaa is alanine, valine, glycine, serine, or an amino acid residue which is covalently linked to another amino acid residue of the sequence
  MISC_FEATURE (25)..(25): Xaa is isoleucine, leucine, valine, phenylalanine, methionine, or an amino acid residue which is covalently linked to another amino acid residue of the sequence
  MISC_FEATURE (26)..(26): Xaa is isoleucine, leucine, valine, phenylalanine, methionine, or an amino acid residue which is covalently linked to another amino acid residue of the sequence
  MISC_FEATURE (27)..(27): Xaa is glycine, alanine, serine, or an amino acid residue which is covalently linked to another amino acid residue of the sequence
  MISC_FEATURE (28)..(28): Xaa is leucine, isoleucine, valine, phenylalanine, methionine, or an amino acid residue which is covalently linked to another amino acid residue of the sequence
  MISC_FEATURE (29)..(29): Xaa is methionine, valine, leucine, isoleucine, alanine, or an amino acid residue which is covalently linked to another amino acid residue of the sequence
  MISC_FEATURE (30)..(30): Xaa is valine, leucine, isoleucine, alanine, methionine, or an amino acid residue which is covalently linked to another amino acid residue of the sequence
  MISC_FEATURE (31)..(31): Xaa is glycine, alanine, serine, or an amino acid residue which is covalently linked to another amino acid residue of the sequence
  MISC_FEATURE (32)..(32): Xaa is glycine, alanine, serine, or an amino acid residue which is covalently linked to another amino acid residue of the sequence
  MISC_FEATURE (33)..(33): Xaa is valine, leucine, isoleucine, alanine, methionine, or an amino acid residue which is covalently linked to another amino acid residue of the sequence
DSGYEXXXXXXXXXXXDVGSNKXXXXXXXXXXXVIAT

SEQ ID NO: 376 - protein, 36 aa, Artificial Sequence
  synthetic
  MISC_FEATURE (5)..(5): Xaa is valine, leucine, isoleucine, alanine, methionine, or an amino acid residue which is covalently linked to another amino acid residue of the sequence
  MISC_FEATURE (6)..(6): Xaa is histidine, tyrosine, serine, methionine, or an amino acid residue which is covalently linked to another amino acid residue of the sequence
  MISC_FEATURE (7)..(7): Xaa is histidine, tyrosine, serine, methionine, or an amino acid residue which is covalently linked to another amino acid residue of the sequence
  MISC_FEATURE (8)..(8): Xaa is glutamine, asparagine, methionine, serine, or an amino acid which is covalently linked to another amino acid residue of the sequence
  MISC_FEATURE (9)..(9): Xaa is lysine, arginine, or an amino acid residue which is covalently linked to another amino acid residue of the sequence
  MISC_FEATURE (10)..(10): Xaa is leucine, isoleucine, valine, phenylalanine, methionine, or an amino acid residue which is covalently linked to another amino acid residue of the sequence
  MISC_FEATURE (11)..(11): Xaa is valine, leucine, isoleucine, alanine, methionine, or an amino acid residue which is covalently linked to another amino acid residue of the sequence
  MISC_FEATURE (12)..(12): Xaa is phenylalanine, tyrosine, valine, leucine, isoleucine, methionine, or an amino acid residue which is covalently linked to another amino acid residue of the sequence
  MISC_FEATURE (13)..(13): Xaa is phenylalanine, tyrosine, valine, leucine, isoleucine, methionine, or an amino acid residue which is covalently linked to another amino acid residue of the sequence
  MISC_FEATURE (14)..(14): Xaa is alanine, valine, glycine, serine, or an amino acid residue which is covalently linked to another amino acid residue of the sequence
  MISC_FEATURE (15)..(15): Xaa is glutamic acid, aspartic acid, or an amino acid residue which is covalently linked to another amino acid residue of the sequence
  MISC_FEATURE (22)..(22): Xaa is glycine, alanine, serine, or an amino acid residue which is covalently linked to another amino acid residue of the sequence
  MISC_FEATURE (23)..(23): Xaa is alanine, valine, glycine, serine, or an amino acid residue which is covalently linked to another amino acid residue of the sequence
  MISC_FEATURE (24)..(24): Xaa is isoleucine, leucine, valine, phenylalanine, methionine, or an amino acid residue which is covalently linked to another amino acid residue of the sequence
  MISC_FEATURE (25)..(25): Xaa is isoleucine, leucine, valine, phenylalanine, methionine, or an amino acid residue which is covalently linked to another amino acid residue of the sequence
  MISC_FEATURE (26)..(26): Xaa is glycine, alanine, serine, or an amino acid residue which is covalently linked to another amino acid residue of the sequence
  MISC_FEATURE (27)..(27): Xaa is leucine, isoleucine, valine, phenylalanine, methionine, or an amino acid residue which is covalently linked to another amino acid residue of the sequence
  MISC_FEATURE (28)..(28): Xaa is methionine, valine, leucine, isoleucine, alanine, or an amino acid residue which is covalently linked to another amino acid residue of the sequence
  MISC_FEATURE (29)..(29): Xaa is valine, leucine, isoleucine, alanine, methionine, or an amino acid residue which is covalently linked to another amino acid residue of the sequence
  MISC_FEATURE (30)..(30): Xaa is glycine, alanine, serine, or an amino acid residue which is covalently linked to another amino acid residue of the sequence
  MISC_FEATURE (31)..(31): Xaa is glycine, alanine, serine, or an amino acid residue which is covalently linked to another amino acid residue of the sequence
  MISC_FEATURE (32)..(32): Xaa is valine, leucine, isoleucine, alanine, methionine, or an amino acid residue which is covalently linked to another amino acid residue of the sequence
SGYEXXXXXXXXXXXDVGSNKXXXXXXXXXXXVIAT

SEQ ID NO: 377 - protein, 35 aa, Artificial Sequence
  synthetic
  MISC_FEATURE (4)..(4): Xaa is valine, leucine, isoleucine, alanine, methionine, or an amino acid residue which is covalently linked to another amino acid residue of the sequence
  MISC_FEATURE (5)..(5): Xaa is histidine, tyrosine, serine, methionine, or an amino acid residue which is covalently linked to another amino acid residue of the sequence
  MISC_FEATURE (6)..(6): Xaa is histidine, tyrosine, serine, methionine, or an amino acid residue which is covalently linked to another amino acid residue of the sequence
  MISC_FEATURE (7)..(7): Xaa is glutamine, asparagine, methionine, serine, or an amino acid which is covalently linked to another amino acid residue of the sequence
  MISC_FEATURE (8)..(8): Xaa is lysine, arginine, or an amino acid residue which is covalently linked to another amino acid residue of the sequence
  MISC_FEATURE (9)..(9): Xaa is leucine, isoleucine, valine, phenylalanine, methionine, or an amino acid residue which is covalently linked to another amino acid residue of the sequence
  MISC_FEATURE (10)..(10): Xaa is valine, leucine, isoleucine, alanine, methionine, or an amino acid residue which is covalently linked to another amino acid residue of the sequence
  MISC_FEATURE (11)..(11): Xaa is phenylalanine, tyrosine, valine, leucine, isoleucine, methionine, or an amino acid residue which is covalently linked to another amino acid residue of the sequence
  MISC_FEATURE (12)..(12): Xaa is phenylalanine, tyrosine, valine, leucine, isoleucine, methionine, or an amino acid residue which is covalently linked to another amino acid residue of the sequence
  MISC_FEATURE (13)..(13): Xaa is alanine, valine, glycine, serine, or an amino acid residue which is covalently linked to another amino acid residue of the sequence
  MISC_FEATURE (14)..(14): Xaa is glutamic acid, aspartic acid, or an amino acid residue which is covalently linked to another amino acid residue of the sequence
  MISC_FEATURE (21)..(21): Xaa is glycine, alanine, serine, or an amino acid residue which is covalently linked to another amino acid residue of the sequence
  MISC_FEATURE (22)..(22): Xaa is alanine, valine, glycine, serine, or an amino acid residue which is covalently linked to another amino acid residue of the sequence
  MISC_FEATURE (23)..(23): Xaa is isoleucine, leucine, valine, phenylalanine, methionine, or an amino acid residue which is covalently linked to another amino acid residue of the sequence
  MISC_FEATURE (24)..(24): Xaa is isoleucine, leucine, valine, phenylalanine, methionine, or an amino acid residue which is covalently linked to another amino acid residue of the sequence
  MISC_FEATURE (25)..(25): Xaa is glycine, alanine, serine, or an amino acid residue which is covalently linked to another amino acid residue of the sequence
  MISC_FEATURE (26)..(26): Xaa is leucine, isoleucine, valine, phenylalanine, methionine, or an amino acid residue which is covalently linked to another amino acid residue of the sequence
  MISC_FEATURE (27)..(27): Xaa is methionine, valine, leucine, isoleucine, alanine, or an amino acid residue which is covalently linked to another amino acid residue of the sequence
  MISC_FEATURE (28)..(28): Xaa is valine, leucine, isoleucine, alanine, methionine, or an amino acid residue which is covalently linked to another amino acid residue of the sequence
  MISC_FEATURE (29)..(29): Xaa is glycine, alanine, serine, or an amino acid residue which is covalently linked to another amino acid residue of the sequence
  MISC_FEATURE (30)..(30): Xaa is glycine, alanine, serine, or an amino acid residue which is covalently linked to another amino acid residue of the sequence
  MISC_FEATURE (31)..(31): Xaa is valine, leucine, isoleucine, alanine, methionine, or an amino acid residue which is covalently linked to another amino acid residue of the sequence
GYEXXXXXXXXXXXDVGSNKXXXXXXXXXXXVIAT

SEQ ID NO: 378 - protein, 34 aa, Artificial Sequence
  synthetic
  MISC_FEATURE (3)..(3): Xaa is valine, leucine, isoleucine, alanine, methionine, or an amino acid residue which is covalently linked to another amino acid residue of the sequence
  MISC_FEATURE (4)..(4): Xaa is histidine, tyrosine, serine, methionine, or an amino acid residue which is covalently linked to another amino acid residue of the sequence
  MISC_FEATURE (5)..(5): Xaa is histidine, tyrosine, serine, methionine, or an amino acid residue which is covalently linked to another amino acid residue of the sequence
  MISC_FEATURE (6)..(6): Xaa is glutamine, asparagine, methionine, serine, or an amino acid which is covalently linked to another amino acid residue of the sequence
  MISC_FEATURE (7)..(7): Xaa is lysine, arginine, or an amino acid residue which is covalently linked to another amino acid residue of the sequence
  MISC_FEATURE (8)..(8): Xaa is leucine, isoleucine, valine, phenylalanine, methionine, or an amino acid residue which is covalently linked to another amino acid residue of the sequence
  MISC_FEATURE (9)..(9): Xaa is valine, leucine, isoleucine, alanine, methionine, or an amino acid residue which is covalently linked to another amino acid residue of the sequence
  MISC_FEATURE (10)..(10): Xaa is phenylalanine, tyrosine, valine, leucine, isoleucine, methionine, or an amino acid residue which is covalently linked to another amino acid residue of the sequence
  MISC_FEATURE (11)..(11): Xaa is phenylalanine, tyrosine, valine, leucine, isoleucine, methionine, or an amino acid residue which is covalently linked to another amino acid residue of the sequence
  MISC_FEATURE (12)..(12): Xaa is alanine, valine, glycine, serine, or an amino acid residue which is covalently linked to another amino acid residue of the sequence
  MISC_FEATURE (13)..(13): Xaa is glutamic acid, aspartic acid, or an amino acid residue which is covalently linked to another amino acid residue of the sequence
  MISC_FEATURE (20)..(20): Xaa is glycine, alanine, serine, or an amino acid residue which is covalently linked to another amino acid residue of the sequence
  MISC_FEATURE (21)..(21): Xaa is alanine, valine, glycine, serine, or an amino acid residue which is covalently linked to another amino acid residue of the sequence
  MISC_FEATURE (22)..(22): Xaa is isoleucine, leucine, valine, phenylalanine, methionine, or an amino acid residue which is covalently linked to another amino acid residue of the sequence
  MISC_FEATURE (23)..(23): Xaa is isoleucine, leucine, valine, phenylalanine, methionine, or an amino acid residue which is covalently linked to another amino acid residue of the sequence
  MISC_FEATURE (24)..(24): Xaa is glycine, alanine, serine, or an amino acid residue which is covalently linked to another amino acid residue of the sequence
  MISC_FEATURE (25)..(25): Xaa is leucine, isoleucine, valine, phenylalanine, methionine, or an amino acid residue which is covalently linked to another amino acid residue of the sequence
  MISC_FEATURE (26)..(26): Xaa is methionine, valine, leucine, isoleucine, alanine, or an amino acid residue which is covalently linked to another amino acid residue of the sequence
  MISC_FEATURE (27)..(27): Xaa is valine, leucine, isoleucine, alanine, methionine, or an amino acid residue which is covalently linked to another amino acid residue of the sequence
  MISC_FEATURE (28)..(28): Xaa is glycine, alanine, serine, or an amino acid residue which is covalently linked to another amino acid residue of the sequence
  MISC_FEATURE (29)..(29): Xaa is glycine, alanine, serine, or an amino acid residue which is covalently linked to another amino acid residue of the sequence
  MISC_FEATURE (30)..(30): Xaa is valine, leucine, isoleucine, alanine, methionine, or an amino acid residue which is covalently linked to another amino acid residue of the sequence
YEXXXXXXXXXXXDVGSNKXXXXXXXXXXXVIAT

SEQ ID NO: 379 - protein, 33 aa, Artificial Sequence
  synthetic
  MISC_FEATURE (2)..(2): Xaa is valine, leucine, isoleucine, alanine, methionine, or an amino acid residue which is covalently linked to another amino acid residue of the sequence
  MISC_FEATURE (3)..(3): Xaa is histidine, tyrosine, serine, methionine, or an amino acid residue which is covalently linked to another amino acid residue of the sequence
  MISC_FEATURE (4)..(4): Xaa is histidine, tyrosine, serine, methionine, or an amino acid residue which is covalently linked to another amino acid residue of the sequence
  MISC_FEATURE (5)..(5): Xaa is glutamine, asparagine, methionine, serine, or an amino acid which is covalently linked to another amino acid residue of the sequence
  MISC_FEATURE (6)..(6): Xaa is lysine, arginine, or an amino acid residue which is covalently linked to another amino acid residue of the sequence
  MISC_FEATURE (7)..(7): Xaa is leucine, isoleucine, valine, phenylalanine, methionine, or an amino acid residue which is covalently linked to another amino acid residue of the sequence
  MISC_FEATURE (8)..(8): Xaa is valine, leucine, isoleucine, alanine, methionine, or an amino acid residue which is covalently linked to another amino acid residue of the sequence
  MISC_FEATURE (9)..(9): Xaa is phenylalanine, tyrosine, valine, leucine, isoleucine, methionine, or an amino acid residue which is covalently linked to another amino acid residue of the sequence
  MISC_FEATURE (10)..(10): Xaa is phenylalanine, tyrosine, valine, leucine, isoleucine, methionine, or an amino acid residue which is covalently linked to another amino acid residue of the sequence
  MISC_FEATURE (11)..(11): Xaa is alanine, valine, glycine, serine, or an amino acid residue which is covalently linked to another amino acid residue of the sequence
  MISC_FEATURE (12)..(12): Xaa is glutamic acid, aspartic acid, or an amino acid residue which is covalently linked to another amino acid residue of the sequence
  MISC_FEATURE (19)..(19): Xaa is glycine, alanine, serine, or an amino acid residue which is covalently linked to another amino acid residue of the sequence
  MISC_FEATURE (20)..(20): Xaa is alanine, valine, glycine, serine, or an amino acid residue which is covalently linked to another amino acid residue of the sequence
  MISC_FEATURE (21)..(21): Xaa is isoleucine, leucine, valine, phenylalanine, methionine, or an amino acid residue which is covalently linked to another amino acid residue of the sequence
  MISC_FEATURE (22)..(22): Xaa is isoleucine, leucine, valine, phenylalanine, methionine, or an amino acid residue which is covalently linked to another amino acid residue of the sequence
  MISC_FEATURE (23)..(23): Xaa is glycine, alanine, serine, or an amino acid residue which is covalently linked to another amino acid residue of the sequence
  MISC_FEATURE (24)..(24): Xaa is leucine, isoleucine, valine, phenylalanine, methionine, or an amino acid residue which is covalently linked to another amino acid residue of the sequence
  MISC_FEATURE (25)..(25): Xaa is methionine, valine, leucine, isoleucine, alanine, or an amino acid residue which is covalently linked to another amino acid residue of the sequence
  MISC_FEATURE (26)..(26): Xaa is valine, leucine, isoleucine, alanine, methionine, or an amino acid residue which is covalently linked to another amino acid residue of the sequence
  MISC_FEATURE (27)..(27): Xaa is glycine, alanine, serine, or an amino acid residue which is covalently linked to another amino acid residue of the sequence
  MISC_FEATURE (28)..(28): Xaa is glycine, alanine, serine, or an amino acid residue which is covalently linked to another amino acid residue of the sequence
  MISC_FEATURE (29)..(29): Xaa is valine, leucine, isoleucine, alanine, methionine, or an amino acid residue which is covalently linked to another amino acid residue of the sequence
EXXXXXXXXXXXDVGSNKXXXXXXXXXXXVIAT

SEQ ID NO: 380 - protein, 32 aa, Artificial Sequence
  synthetic
  MISC_FEATURE (1)..(1): Xaa is valine, leucine, isoleucine, alanine, methionine, or an amino acid residue which is covalently linked to another amino acid residue of the sequence
  MISC_FEATURE (2)..(2): Xaa is histidine, tyrosine, serine, methionine, or an amino acid residue which is covalently linked to another amino acid residue of the sequence
  MISC_FEATURE (3)..(3): Xaa is histidine, tyrosine, serine, methionine, or an amino acid residue which is covalently linked to another amino acid residue of the sequence
  MISC_FEATURE (4)..(4): Xaa is glutamine, asparagine, methionine, serine, or an amino acid which is covalently linked to another amino acid residue of the sequence
  MISC_FEATURE (5)..(5): Xaa is lysine, arginine, or an amino acid residue which is covalently linked to another amino acid residue of the sequence
  MISC_FEATURE (6)..(6): Xaa is leucine, isoleucine, valine, phenylalanine, methionine, or an amino acid residue which is covalently linked to another amino acid residue of the sequence
  MISC_FEATURE (7)..(7): Xaa is valine, leucine, isoleucine, alanine, methionine, or an amino acid residue which is covalently linked to another amino acid residue of the sequence
  MISC_FEATURE (8)..(8): Xaa is phenylalanine, tyrosine, valine, leucine, isoleucine, methionine, or an amino acid residue which is covalently linked to another amino acid residue of the sequence
  MISC_FEATURE (9)..(9): Xaa is phenylalanine, tyrosine, valine, leucine, isoleucine, methionine, or an amino acid residue which is covalently linked to another amino acid residue of the sequence
  MISC_FEATURE (10)..(10): Xaa is alanine, valine, glycine, serine, or an amino acid residue which is covalently linked to another amino acid residue of the sequence
  MISC_FEATURE (11)..(11): Xaa is glutamic acid, aspartic acid, or an amino acid residue which is covalently linked to another amino acid residue of the sequence
  MISC_FEATURE (18)..(18): Xaa is glycine, alanine, serine, or an amino acid residue which is covalently linked to another amino acid residue of the sequence
  MISC_FEATURE (19)..(19): Xaa is alanine, valine, glycine, serine, or an amino acid residue which is covalently linked to another amino acid residue of the sequence
  MISC_FEATURE (20)..(20): Xaa is isoleucine, leucine, valine, phenylalanine, methionine, or an amino acid residue which is covalently linked to another amino acid residue of the sequence
  MISC_FEATURE (21)..(21): Xaa is isoleucine, leucine, valine, phenylalanine, methionine, or an amino acid residue which is covalently linked to another amino acid residue of the sequence
  MISC_FEATURE (22)..(22): Xaa is glycine, alanine, serine, or an amino acid residue which is covalently linked to another amino acid residue of the sequence
  MISC_FEATURE (23)..(23): Xaa is leucine, isoleucine, valine, phenylalanine, methionine, or an amino acid residue which is covalently linked to another amino acid residue of the sequence
  MISC_FEATURE (24)..(24): Xaa is methionine, valine, leucine, isoleucine, alanine, or an amino acid residue which is covalently linked to another amino acid residue of the sequence
  MISC_FEATURE (25)..(25): Xaa is valine, leucine, isoleucine, alanine, methionine, or an amino acid residue which is covalently linked to another amino acid residue of the sequence
  MISC_FEATURE (26)..(26): Xaa is glycine, alanine, serine, or an amino acid residue which is covalently linked to another amino acid residue of the sequence
  MISC_FEATURE (27)..(27): Xaa is glycine, alanine, serine, or an amino acid residue which is covalently linked to another amino acid residue of the sequence
  MISC_FEATURE (28)..(28): Xaa is valine, leucine, isoleucine, alanine, methionine, or an amino acid residue which is covalently linked to another amino acid residue of the sequence
XXXXXXXXXXXDVGSNKXXXXXXXXXXXVIAT

SEQ ID NO: 381 - protein, 31 aa, Artificial Sequence
  synthetic
  MISC_FEATURE (1)..(1): Xaa is histidine, tyrosine, serine, methionine, or an amino acid residue which is covalently linked to another amino acid residue of the sequence
  MISC_FEATURE (2)..(2): Xaa is histidine, tyrosine, serine, methionine, or an amino acid residue which is covalently linked to another amino acid residue of the sequence
  MISC_FEATURE (3)..(3): Xaa is glutamine, asparagine, methionine, serine, or an amino acid which is covalently linked to another amino acid residue of the sequence
  MISC_FEATURE (4)..(4): Xaa is lysine, arginine, or an amino acid residue which is covalently linked to another amino acid residue of the sequence
  MISC_FEATURE (5)..(5): Xaa is leucine, isoleucine, valine, phenylalanine, methionine, or an amino acid residue which is covalently linked to another amino acid residue of the sequence
  MISC_FEATURE (6)..(6): Xaa is valine, leucine, isoleucine, alanine, methionine, or an amino acid residue which is covalently linked to another amino acid residue of the sequence
  MISC_FEATURE (7)..(7): Xaa is phenylalanine, tyrosine, valine, leucine, isoleucine, methionine, or an amino acid residue which is covalently linked to another amino acid residue of the sequence
  MISC_FEATURE (8)..(8): Xaa is phenylalanine, tyrosine, valine, leucine, isoleucine, methionine, or an amino acid residue which is covalently linked to another amino acid residue of the sequence
  MISC_FEATURE (9)..(9): Xaa is alanine, valine, glycine, serine, or an amino acid residue which is covalently linked to another amino acid residue of the sequence
  MISC_FEATURE (10)..(10): Xaa is glutamic acid, aspartic acid, or an amino acid residue which is covalently linked to another amino acid residue of the sequence
  MISC_FEATURE (17)..(17): Xaa is glycine, alanine, serine, or an amino acid residue which is covalently linked to another amino acid residue of the sequence
  MISC_FEATURE (18)..(18): Xaa is alanine, valine, glycine, serine, or an amino acid residue which is covalently linked to another amino acid residue of the sequence
  MISC_FEATURE (19)..(19): Xaa is isoleucine, leucine, valine, phenylalanine, methionine, or an amino acid residue which is covalently linked to another amino acid residue of the sequence
  MISC_FEATURE (20)..(20): Xaa is isoleucine, leucine, valine, phenylalanine, methionine, or an amino acid residue which is covalently linked to another amino acid residue of the sequence
  MISC_FEATURE (21)..(21): Xaa is glycine, alanine, serine, or an amino acid residue which is covalently linked to another amino acid residue of the sequence
  MISC_FEATURE (22)..(22): Xaa is leucine, isoleucine, valine, phenylalanine, methionine, or an amino acid residue which is covalently linked to another amino acid residue of the sequence
  MISC_FEATURE (23)..(23): Xaa is methionine, valine, leucine, isoleucine, alanine, or an amino acid residue which is covalently linked to another amino acid residue of the sequence
  MISC_FEATURE (24)..(24): Xaa is valine, leucine, isoleucine, alanine, methionine, or an amino acid residue which is covalently linked to another amino acid residue of the sequence
  MISC_FEATURE (25)..(25): Xaa is glycine, alanine, serine, or an amino acid residue which is covalently linked to another amino acid residue of the sequence
  MISC_FEATURE (26)..(26): Xaa is glycine, alanine, serine, or an amino acid residue which is covalently linked to another amino acid residue of the sequence
XXXXXXXXXXDVGSNKXXXXXXXXXXVVIAT

SEQ ID NO: 382 - protein, 30 aa, Artificial Sequence
  synthetic
  MISC_FEATURE (1)..(1): Xaa is histidine, tyrosine, serine, methionine, or an amino acid residue which is covalently linked to another amino acid residue of the sequence
  MISC_FEATURE (2)..(2): Xaa is glutamine, asparagine, methionine, serine, or an amino acid which is covalently linked to another amino acid residue of the sequence
  MISC_FEATURE (3)..(3): Xaa is lysine, arginine, or an amino acid residue which is covalently linked to another amino acid residue of the sequence
  MISC_FEATURE (4)..(4): Xaa is leucine, isoleucine, valine, phenylalanine, methionine, or an amino acid residue which is covalently linked to another amino acid residue of the sequence
  MISC_FEATURE (5)..(5): Xaa is valine, leucine, isoleucine, alanine, methionine, or an amino acid residue which is covalently linked to another amino acid residue of the sequence
  MISC_FEATURE (6)..(6): Xaa is phenylalanine, tyrosine, valine, leucine, isoleucine, methionine, or an amino acid residue which is covalently linked to another amino acid residue of the sequence
  MISC_FEATURE (7)..(7): Xaa is phenylalanine, tyrosine, valine, leucine, isoleucine, methionine, or an amino acid residue which is covalently linked to another amino acid residue of the sequence
  MISC_FEATURE (8)..(8): Xaa is alanine, valine, glycine, serine, or an amino acid residue which is covalently linked to another amino acid residue of the sequence
  MISC_FEATURE (9)..(9): Xaa is glutamic acid, aspartic acid, or an amino acid residue which is covalently linked to another amino acid residue of the sequence
  MISC_FEATURE (16)..(16): Xaa is glycine, alanine, serine, or an amino acid residue which is covalently linked to another amino acid residue of the sequence
  MISC_FEATURE (17)..(17): Xaa is alanine, valine, glycine, serine, or an amino acid residue which is covalently linked to another amino acid residue of the sequence
  MISC_FEATURE (18)..(18): Xaa is isoleucine, leucine, valine, phenylalanine, methionine, or an amino acid residue which is covalently linked to another amino acid residue of the sequence
  MISC_FEATURE (19)..(19): Xaa is isoleucine, leucine, valine, phenylalanine, methionine, or an amino acid residue which is covalently linked to another amino acid residue of the sequence
  MISC_FEATURE (20)..(20): Xaa is glycine, alanine, serine, or an amino acid residue which is covalently linked to another amino acid residue of the sequence
  MISC_FEATURE (21)..(21): Xaa is leucine, isoleucine, valine, phenylalanine, methionine, or an amino acid residue which is covalently linked to another amino acid residue of the sequence
  MISC_FEATURE (22)..(22): Xaa is methionine, valine, leucine, isoleucine, alanine, or an amino acid residue which is covalently linked to another amino acid residue of the sequence
  MISC_FEATURE (23)..(23): Xaa is valine, leucine, isoleucine, alanine, methionine, or an amino acid residue which is covalently linked to another amino acid residue of the sequence
  MISC_FEATURE (24)..(24): Xaa is glycine, alanine, serine, or an amino acid residue which is covalently linked to another amino acid residue of the sequence
XXXXXXXXXDVGSNKXXXXXXXXXGVVIAT

SEQ ID NO: 383 - protein, 29 aa, Artificial Sequence
  synthetic
  MISC_FEATURE (1)..(1): Xaa is glutamine, asparagine, methionine, serine, or an amino acid which is covalently linked to another amino acid residue of the sequence
  MISC_FEATURE (2)..(2): Xaa is lysine, arginine, or an amino acid residue which is covalently linked to another amino acid residue of the sequence
  MISC_FEATURE (3)..(3): Xaa is leucine, isoleucine, valine, phenylalanine, methionine, or an amino acid residue which is covalently linked to another amino acid residue of the sequence
  MISC_FEATURE (4)..(4): Xaa is valine, leucine, isoleucine, alanine, methionine, or an amino acid residue which is covalently linked to another amino acid residue of the sequence
  MISC_FEATURE (5)..(5): Xaa is phenylalanine, tyrosine, valine, leucine, isoleucine, methionine, or an amino acid residue which is covalently linked to another amino acid residue of the sequence
  MISC_FEATURE (6)..(6): Xaa is phenylalanine, tyrosine, valine, leucine, isoleucine, methionine, or an amino acid residue which is covalently linked to another amino acid residue of the sequence
  MISC_FEATURE (7)..(7): Xaa is alanine, valine, glycine, serine, or an amino acid residue which is covalently linked to another amino acid residue of the sequence
  MISC_FEATURE (8)..(8): Xaa is glutamic acid, aspartic acid, or an amino acid residue which is covalently linked to another amino acid residue of the sequence
  MISC_FEATURE (15)..(15): Xaa is glycine, alanine, serine, or an amino acid residue which is covalently linked to another amino acid residue of the sequence
  MISC_FEATURE (16)..(16): Xaa is alanine, valine, glycine, serine, or an amino acid residue which is covalently linked to another amino acid residue of the sequence
  MISC_FEATURE (17)..(17): Xaa is isoleucine, leucine, valine, phenylalanine, methionine, or an amino acid residue which is covalently linked to another amino acid residue of the sequence
  MISC_FEATURE (18)..(18): Xaa is isoleucine, leucine, valine, phenylalanine, methionine, or an amino acid residue which is covalently linked to another amino acid residue of the sequence
  MISC_FEATURE (19)..(19): Xaa is glycine, alanine, serine, or an amino acid residue which is covalently linked to another amino acid residue of the sequence
  MISC_FEATURE (20)..(20): Xaa is leucine, isoleucine, valine, phenylalanine, methionine, or an amino acid residue which is covalently linked to another amino acid residue of the sequence
  MISC_FEATURE (21)..(21): Xaa is methionine, valine, leucine, isoleucine, alanine, or an amino acid residue which is covalently linked to another amino acid residue of the sequence
  MISC_FEATURE (22)..(22): Xaa is valine, leucine, isoleucine, alanine, methionine, or an amino acid residue which is covalently linked to another amino acid residue of the sequence
XXXXXXXXDVGSNKXXXXXXXXGGVVIAT

SEQ ID NO: 384 - protein, 28 aa, Artificial Sequence
  synthetic
  MISC_FEATURE (1)..(1): Xaa is lysine, arginine, or an amino acid residue which is covalently linked to another amino acid residue of the sequence
  MISC_FEATURE (2)..(2): Xaa is leucine, isoleucine, valine, phenylalanine, methionine, or an amino acid residue which is covalently linked to another amino acid residue of the sequence
  MISC_FEATURE (3)..(3): Xaa is valine, leucine, isoleucine, alanine, methionine, or an amino acid residue which is covalently linked to another amino acid residue of the sequence
  MISC_FEATURE (4)..(4): Xaa is phenylalanine, tyrosine, valine, leucine, isoleucine, methionine, or an amino acid residue which is covalently linked to another amino acid residue of the sequence
  MISC_FEATURE (5)..(5): Xaa is phenylalanine, tyrosine, valine, leucine, isoleucine, methionine, or an amino acid residue which is covalently linked to another amino acid residue of the sequence
  MISC_FEATURE (6)..(6): Xaa is alanine, valine, glycine, serine, or an amino acid residue which is covalently linked to another amino acid residue of the sequence
  MISC_FEATURE (7)..(7): Xaa is glutamic acid, aspartic acid, or an amino acid residue which is covalently linked to another amino acid residue of the sequence
  MISC_FEATURE (14)..(14): Xaa is glycine, alanine, serine, or an amino acid residue which is covalently linked to another amino acid residue of the sequence
  MISC_FEATURE (15)..(15): Xaa is alanine, valine, glycine, serine, or an amino acid residue which is covalently linked to another amino acid residue of the sequence
  MISC_FEATURE (16)..(16): Xaa is isoleucine, leucine, valine, phenylalanine, methionine, or an amino acid residue which is covalently linked to another amino acid residue of the sequence
  MISC_FEATURE (17)..(17): Xaa is isoleucine, leucine, valine, phenylalanine, methionine, or an amino acid residue which is covalently linked to another amino acid residue of the sequence
  MISC_FEATURE (18)..(18): Xaa is glycine, alanine, serine, or an amino acid residue which is covalently linked to another amino acid residue of the sequence
  MISC_FEATURE (19)..(19): Xaa is leucine, isoleucine, valine, phenylalanine, methionine, or an amino acid residue which is covalently linked to another amino acid residue of the sequence
  MISC_FEATURE (20)..(20): Xaa is methionine, valine, leucine, isoleucine, alanine, or an amino acid residue which is covalently linked to another amino acid residue of the sequence
XXXXXXXDVGSNKXXXXXXXVGGVVIAT

SEQ ID NO: 385 - protein, 27 aa, Artificial Sequence
  synthetic
  MISC_FEATURE (1)..(1): Xaa is leucine, isoleucine, valine, phenylalanine, methionine, or an amino acid residue which is covalently linked to another amino acid residue of the sequence
  MISC_FEATURE (2)..(2): Xaa is valine, leucine, isoleucine, alanine, methionine, or an amino acid residue which is covalently linked to another amino acid residue of the sequence
  MISC_FEATURE (3)..(3): Xaa is phenylalanine, tyrosine, valine, leucine, isoleucine, methionine, or an amino acid residue which is covalently linked to another amino acid residue of the sequence
  MISC_FEATURE (4)..(4): Xaa is phenylalanine, tyrosine, valine, leucine, isoleucine, methionine, or an amino acid residue which is covalently linked to another amino acid residue of the sequence
  MISC_FEATURE (5)..(5): Xaa is alanine, valine, glycine, serine, or an amino acid residue which is covalently linked to another amino acid residue of the sequence
  MISC_FEATURE (6)..(6): Xaa is glutamic acid, aspartic acid, or an amino acid residue which is covalently linked to another amino acid residue of the sequence
  MISC_FEATURE (13)..(13): Xaa is glycine, alanine, serine, or an amino acid residue which is covalently linked to another amino acid residue of the sequence
  MISC_FEATURE (14)..(14): Xaa is alanine, valine, glycine, serine, or an amino acid residue which is covalently linked to another amino acid residue of the sequence
  MISC_FEATURE (15)..(15): Xaa is isoleucine, leucine, valine, phenylalanine, methionine, or an amino acid residue which is covalently linked to another amino acid residue of the sequence
  MISC_FEATURE (16)..(16): Xaa is isoleucine, leucine, valine, phenylalanine, methionine, or an amino acid residue which is covalently linked to another amino acid residue of the sequence
  MISC_FEATURE (17)..(17): Xaa is glycine, alanine, serine, or an amino acid residue which is covalently linked to another amino acid residue of the sequence
  MISC_FEATURE (18)..(18): Xaa is leucine, isoleucine, valine, phenylalanine, methionine, or an amino acid residue which is covalently linked to another amino acid residue of the sequence
XXXXXXDVGSNKXXXXXXMVGGVVIAT

SEQ ID NO: 386 - protein, 26 aa, Artificial Sequence
  synthetic
  MISC_FEATURE (1)..(1): Xaa is valine, leucine, isoleucine, alanine, methionine, or an amino acid residue which is covalently linked to another amino acid residue of the sequence
  MISC_FEATURE (2)..(2): Xaa is phenylalanine, tyrosine, valine, leucine, isoleucine, methionine, or an amino acid residue which is covalently linked to another amino acid residue of the sequence
  MISC_FEATURE (3)..(3): Xaa is phenylalanine, tyrosine, valine, leucine, isoleucine, methionine, or an amino acid residue which is covalently linked to another amino acid residue of the sequence
  MISC_FEATURE (4)..(4): Xaa is alanine, valine, glycine, serine, or an amino acid residue which is covalently linked to another amino acid residue of the sequence
  MISC_FEATURE (5)..(5): Xaa is glutamic acid, aspartic acid, or an amino acid residue which is covalently linked to another amino acid residue of the sequence
  MISC_FEATURE (12)..(12): Xaa is glycine, alanine, serine, or an amino acid residue which is covalently linked to another amino acid residue of the sequence
  MISC_FEATURE (13)..(13): Xaa is alanine, valine, glycine, serine, or an amino acid residue which is covalently linked to another amino acid residue of the sequence
  MISC_FEATURE (14)..(14): Xaa is isoleucine, leucine, valine, phenylalanine, methionine, or an amino acid residue which is covalently linked to another amino acid residue of the sequence
  MISC_FEATURE (15)..(15): Xaa is isoleucine, leucine, valine, phenylalanine, methionine, or an amino acid residue which is covalently linked to another amino acid residue of the sequence
  MISC_FEATURE (16)..(16): Xaa is glycine, alanine, serine, or an amino acid residue which is covalently linked to another amino acid residue of the sequence
XXXXXDVGSNKXXXXXLMVGGVVIAT

SEQ ID NO: 387 - protein, 25 aa, Artificial Sequence
  synthetic
  MISC_FEATURE (1)..(1): Xaa is phenylalanine, tyrosine, valine, leucine, isoleucine, methionine, or an amino acid residue which is covalently linked to another amino acid residue of the sequence
  MISC_FEATURE (2)..(2): Xaa is phenylalanine, tyrosine, valine, leucine, isoleucine, methionine, or an amino acid residue which is covalently linked to another amino acid residue of the sequence
  MISC_FEATURE (3)..(3): Xaa is alanine, valine, glycine, serine, or an amino acid residue which is covalently linked to another amino acid residue of the sequence
  MISC_FEATURE (4)..(4): Xaa is glutamic acid, aspartic acid, or an amino acid residue which is covalently linked to another amino acid residue of the sequence
  MISC_FEATURE (11)..(11): Xaa is glycine, alanine, serine, or an amino acid residue which is covalently linked to another amino acid residue of the sequence
  MISC_FEATURE (12)..(12): Xaa is alanine, valine, glycine, serine, or an amino acid residue which is covalently linked to another amino acid residue of the sequence
  MISC_FEATURE (13)..(13): Xaa is isoleucine, leucine, valine, phenylalanine, methionine, or an amino acid residue which is covalently linked to another amino acid residue of the sequence
  MISC_FEATURE (14)..(14): Xaa is isoleucine, leucine, valine, phenylalanine, methionine, or an amino acid residue which is covalently linked to another amino acid residue of the sequence
XXXXDVGSNKXXXXGLMVGGVVIAT

SEQ ID NO: 388 - protein, 24 aa, Artificial Sequence
  synthetic
  MISC_FEATURE (1)..(1): Xaa is phenylalanine, tyrosine, valine, leucine, isoleucine, methionine, or an amino acid residue which is covalently linked to another amino acid residue of the sequence
  MISC_FEATURE (2)..(2): Xaa is alanine, valine, glycine, serine, or an amino acid residue which is covalently linked to another amino acid residue of the sequence
  MISC_FEATURE (3)..(3): Xaa is glutamic acid, aspartic acid, or an amino acid residue which is covalently linked to another amino acid residue of the sequence
  MISC_FEATURE (10)..(10): Xaa is glycine, alanine, serine, or an amino acid residue which is covalently linked to another amino acid residue of the sequence
  MISC_FEATURE (11)..(11): Xaa is alanine, valine, glycine, serine, or an amino acid residue which is covalently linked to another amino acid residue of the sequence
  MISC_FEATURE (12)..(12): Xaa is isoleucine, leucine, valine, phenylalanine, methionine, or an amino acid residue which is covalently linked to another amino acid residue of the sequence
XXXDVGSNKXXXIGLMVGGVVIAT

SEQ ID NO: 389 - protein, 23 aa, Artificial Sequence
  synthetic
  MISC_FEATURE (1)..(1): Xaa is alanine, valine, glycine, serine, or an amino acid residue which is covalently linked to another amino acid residue of the sequence
  MISC_FEATURE (2)..(2): Xaa is glutamic acid, aspartic acid, or an amino acid residue which is covalently linked to another amino acid residue of the sequence
  MISC_FEATURE (9)..(9): Xaa is glycine, alanine, serine, or an amino acid residue which is covalently linked to another amino acid residue of the sequence
  MISC_FEATURE (10)..(10): Xaa is alanine, valine, glycine, serine, or an amino acid residue which is covalently linked to another amino acid residue of the sequence
XXDVGSNKXXIIGLMVGGVVIAT

SEQ ID NO: 390 - protein, 22 aa, Artificial Sequence
  synthetic
  MISC_FEATURE (1)..(1): Xaa is glutamic acid, aspartic acid, or an amino acid residue which is covalently linked to another amino acid residue of the sequence
  MISC_FEATURE (8)..(8): Xaa is glycine, alanine, serine, or an amino acid residue which is covalently linked to another amino acid residue of the sequence
XDVGSNKXAIIGLMVGGVVIAT

SEQ ID NO: 391 - protein, 42 aa, Artificial Sequence
  synthetic
  MISC_FEATURE (12)..(12): Xaa is valine, leucine, isoleucine, alanine, methionine, or an amino acid residue which is covalently linked to another amino acid residue of the sequence
  MISC_FEATURE (13)..(13): Xaa is histidine, tyrosine, serine, methionine, or an amino acid residue which is covalently linked to another amino acid residue of the sequence
  MISC_FEATURE (14)..(14): Xaa is histidine, tyrosine, serine, methionine, or an amino acid residue which is covalently linked to another amino acid residue of the sequence
  MISC_FEATURE (15)..(15): Xaa is glutamine, asparagine, methionine, serine, or an amino acid which is covalently linked to another amino acid residue of the sequence
  MISC_FEATURE (16)..(16): Xaa is lysine, arginine, or an amino acid residue which is covalently linked to another amino acid residue of the sequence
  MISC_FEATURE (17)..(17): Xaa is leucine, isoleucine, valine, phenylalanine, methionine, or an amino acid residue which is covalently linked to another amino acid residue of the sequence
  MISC_FEATURE (18)..(18): Xaa is valine, leucine, isoleucine, alanine, methionine, or an amino acid residue which is covalently linked to another amino acid residue of the sequence
  MISC_FEATURE (19)..(19): Xaa is phenylalanine, tyrosine, valine, leucine, isoleucine, methionine, or an amino acid residue which is covalently linked to another amino acid residue of the sequence
  MISC_FEATURE (20)..(20): Xaa is phenylalanine, tyrosine, valine, leucine, isoleucine, methionine, or an amino acid residue which is covalently linked to another amino acid residue of the sequence
  MISC_FEATURE (21)..(21): Xaa is alanine, valine, glycine, serine, or an amino acid residue which is covalently linked to another amino acid residue of the sequence
  MISC_FEATURE (22)..(22): Xaa is glutamic acid, aspartic acid, or an amino acid residue which is covalently linked to another amino acid residue of the sequence
  MISC_FEATURE (29)..(29): Xaa is glycine, alanine, serine, or an amino acid residue which is covalently linked to another amino acid residue of the sequence
  MISC_FEATURE (30)..(30): Xaa is alanine, valine, glycine, serine, or an amino acid residue which is covalently linked to another amino acid residue of the sequence
  MISC_FEATURE (31)..(31): Xaa is isoleucine, leucine, valine, phenylalanine, methionine, or an amino acid residue which is covalently linked to another amino acid residue of the sequence
  MISC_FEATURE (32)..(32): Xaa is isoleucine, leucine, valine, phenylalanine, methionine, or an amino acid residue which is covalently linked to another amino acid residue of the sequence
  MISC_FEATURE (33)..(33): Xaa is glycine, alanine, serine, or an amino acid residue which is covalently linked to another amino acid residue of the sequence
  MISC_FEATURE (34)..(34): Xaa is leucine, isoleucine, valine, phenylalanine, methionine, or an amino acid residue which is covalently linked to another amino acid residue of the sequence
  MISC_FEATURE (35)..(35): Xaa is methionine, valine, leucine, isoleucine, alanine, or an amino acid residue which is covalently linked to another amino acid residue of the sequence
  MISC_FEATURE (36)..(36): Xaa is valine, leucine, isoleucine, alanine, methionine, or an amino acid residue which is covalently linked to another amino acid residue of the sequence
  MISC_FEATURE (37)..(37): Xaa is glycine, alanine, serine, or an amino acid residue which is covalently linked to another amino acid residue of the sequence
  MISC_FEATURE (38)..(38): Xaa is glycine, alanine, serine, or an amino acid residue which is covalently linked to another amino acid residue of the sequence
  MISC_FEATURE (39)..(39): Xaa is valine, leucine, isoleucine, alanine, methionine, or an amino acid residue which is covalently linked to another amino acid residue of the sequence
DAEFRHDSGYEXXXXXXXXXXXDVGSNKXXXXXXXXXXXVIA

SEQ ID NO: 392 - protein, 41 aa, Artificial Sequence
  synthetic
  MISC_FEATURE (11)..(11): Xaa is valine, leucine, isoleucine, alanine, methionine, or an amino acid residue which is covalently linked to another amino acid residue of the sequence
  MISC_FEATURE (12)..(12): Xaa is histidine, tyrosine, serine, methionine, or an amino acid residue which is covalently linked to another amino acid residue of the sequence
  MISC_FEATURE (13)..(13): Xaa is histidine, tyrosine, serine, methionine, or an amino acid residue which is covalently linked to another amino acid residue of the sequence
  MISC_FEATURE (14)..(14): Xaa is glutamine, asparagine, methionine, serine, or an amino acid which is covalently linked to another amino acid residue of the sequence
  MISC_FEATURE (15)..(15): Xaa is lysine, arginine, or an amino acid residue which is covalently linked to another amino acid residue of the sequence
  MISC_FEATURE (16)..(16): Xaa is leucine, isoleucine, valine, phenylalanine, methionine, or an amino acid residue which is covalently linked to another amino acid residue of the sequence
  MISC_FEATURE (17)..(17): Xaa is valine, leucine, isoleucine, alanine, methionine, or an amino acid residue which is covalently linked to another amino acid residue of the sequence
  MISC_FEATURE (18)..(18): Xaa is phenylalanine, tyrosine, valine, leucine, isoleucine, methionine, or an amino acid residue which is covalently linked to another amino acid residue of the sequence
  MISC_FEATURE (19)..(19): Xaa is phenylalanine, tyrosine, valine, leucine, isoleucine, methionine, or an amino acid residue which is covalently linked to another amino acid residue of the sequence
  MISC_FEATURE (20)..(20): Xaa is alanine, valine, glycine, serine, or an amino acid residue which is covalently linked to another amino acid residue of the sequence
  MISC_FEATURE (21)..(21): Xaa is glutamic acid, aspartic acid, or an amino acid residue which is covalently linked to another amino acid residue of the sequence
  MISC_FEATURE (28)..(28): Xaa is glycine, alanine, serine, or an amino acid residue which is covalently linked to another amino acid residue of the sequence
  MISC_FEATURE (29)..(29): Xaa is alanine, valine, glycine, serine, or an amino acid residue which is covalently linked to another amino acid residue of the sequence
  MISC_FEATURE (30)..(30): Xaa is isoleucine, leucine, valine, phenylalanine, methionine, or an amino acid residue which is covalently linked to another amino acid residue of the sequence
  MISC_FEATURE (31)..(31): Xaa is isoleucine, leucine, valine, phenylalanine, methionine, or an amino acid residue which is covalently linked to another amino acid residue of the sequence
  MISC_FEATURE (32)..(32): Xaa is glycine, alanine, serine, or an amino acid residue which is covalently linked to another amino acid residue of the sequence
  MISC_FEATURE (33)..(33): Xaa is leucine, isoleucine, valine, phenylalanine, methionine, or an amino acid residue which is covalently linked to another amino acid residue of the sequence
  MISC_FEATURE (34)..(34): Xaa is methionine, valine, leucine, isoleucine, alanine, or an amino acid residue which is covalently linked to another amino acid residue of the sequence
  MISC_FEATURE (35)..(35): Xaa is valine, leucine, isoleucine, alanine, methionine, or an amino acid residue which is covalently linked to another amino acid residue of the sequence
  MISC_FEATURE (36)..(36): Xaa is glycine, alanine, serine, or an amino acid residue which is covalently linked to another amino acid residue of the sequence
  MISC_FEATURE (37)..(37): Xaa is glycine, alanine, serine, or an amino acid residue which is covalently linked to another amino acid residue of the sequence
  MISC_FEATURE (38)..(38): Xaa is valine, leucine, isoleucine, alanine, methionine, or an amino acid residue which is covalently linked to another amino acid residue of the sequence
AEFRHDSGYEXXXXXXXXXXXDVGSNKXXXXXXXXXXXVIA

SEQ ID NO: 393 - protein, 40 aa, Artificial Sequence
  synthetic
  MISC_FEATURE (10)..(10): Xaa is valine, leucine, isoleucine, alanine, methionine, or an amino acid residue which is covalently linked to another amino acid residue of the sequence
  MISC_FEATURE (11)..(11): Xaa is histidine, tyrosine, serine, methionine, or an amino acid residue which is covalently linked to another amino acid residue of the sequence
  MISC_FEATURE (12)..(12): Xaa is histidine, tyrosine, serine, methionine, or an amino acid residue which is covalently linked to another amino acid residue of the sequence
  MISC_FEATURE (13)..(13): Xaa is glutamine, asparagine, methionine, serine, or an amino acid which is covalently linked to another amino acid residue of the sequence
  MISC_FEATURE (14)..(14): Xaa is lysine, arginine, or an amino acid residue which is covalently linked to another amino acid residue of the sequence
  MISC_FEATURE (15)..(15): Xaa is leucine, isoleucine, valine, phenylalanine, methionine, or an amino acid residue which is covalently linked to another amino acid residue of the sequence
  MISC_FEATURE (16)..(16): Xaa is valine, leucine, isoleucine, alanine, methionine, or an amino acid residue which is covalently linked to another amino acid residue of the sequence
  MISC_FEATURE (17)..(17): Xaa is phenylalanine, tyrosine, valine, leucine, isoleucine, methionine, or an amino acid residue which is covalently linked to another amino acid residue of the sequence
  MISC_FEATURE (18)..(18): Xaa is phenylalanine, tyrosine, valine, leucine, isoleucine, methionine, or an amino acid residue which is covalently linked to another amino acid residue of the sequence
  MISC_FEATURE (19)..(19): Xaa is alanine, valine, glycine, serine, or an amino acid residue which is covalently linked to another amino acid residue of the sequence
  MISC_FEATURE (20)..(20): Xaa is glutamic acid, aspartic acid, or an amino acid residue which is covalently linked to another amino acid residue of the sequence
  MISC_FEATURE (27)..(27): Xaa is glycine, alanine, serine, or an amino acid residue which is covalently linked to another amino acid residue of the sequence
  MISC_FEATURE (28)..(28): Xaa is alanine, valine, glycine, serine, or an amino acid residue which is covalently linked to another amino acid residue of the sequence
  MISC_FEATURE (29)..(29): Xaa is isoleucine, leucine, valine, phenylalanine, methionine, or an amino acid residue which is covalently linked to another amino acid residue of the sequence
  MISC_FEATURE (30)..(30): Xaa is isoleucine, leucine, valine, phenylalanine, methionine, or an amino acid residue which is covalently linked to another amino acid residue of the sequence
  MISC_FEATURE (31)..(31): Xaa is glycine, alanine, serine, or an amino acid residue which is covalently linked to another amino acid residue of the sequence
  MISC_FEATURE (32)..(32): Xaa is leucine, isoleucine, valine, phenylalanine, methionine, or an amino acid residue which is covalently linked to another amino acid residue of the sequence
  MISC_FEATURE (33)..(33): Xaa is methionine, valine, leucine, isoleucine, alanine, or an amino acid residue which is covalently linked to another amino acid residue of the sequence
  MISC_FEATURE (34)..(34): Xaa is valine, leucine, isoleucine, alanine, methionine, or an amino acid residue which is covalently linked to another amino acid residue of the sequence
  MISC_FEATURE (35)..(35): Xaa is glycine, alanine, serine, or an amino acid residue which is covalently linked to another amino acid residue of the sequence
  MISC_FEATURE (36)..(36): Xaa is glycine, alanine, serine, or an amino acid residue which is covalently linked to another amino acid residue of the sequence
  MISC_FEATURE (37)..(37): Xaa is valine, leucine, isoleucine, alanine, methionine, or an amino acid residue which is covalently linked to another amino acid residue of the sequence
EFRHDSGYEXXXXXXXXXXXDVGSNKXXXXXXXXXXXVIA

SEQ ID NO: 394 - protein, 39 aa, Artificial Sequence
  synthetic
  MISC_FEATURE (9)..(9): Xaa is valine, leucine, isoleucine, alanine, methionine, or an amino acid residue which is covalently linked to another amino acid residue of the sequence
  MISC_FEATURE (10)..(10): Xaa is histidine, tyrosine, serine, methionine, or an amino acid residue which is covalently linked to another amino acid residue of the sequence
  MISC_FEATURE (11)..(11): Xaa is histidine, tyrosine, serine, methionine, or an amino acid residue which is covalently linked to another amino acid residue of the sequence
  MISC_FEATURE (12)..(12): Xaa is glutamine, asparagine, methionine, serine, or an amino acid which is covalently linked to another amino acid residue of the sequence
  MISC_FEATURE (13)..(13): Xaa is lysine, arginine, or an amino acid residue which is covalently linked to another amino acid residue of the sequence
  MISC_FEATURE (14)..(14): Xaa is leucine, isoleucine, valine, phenylalanine, methionine, or an amino acid residue which is covalently linked to another amino acid residue of the sequence
  MISC_FEATURE (15)..(15): Xaa is valine, leucine, isoleucine, alanine, methionine, or an amino acid residue which is covalently linked to another amino acid residue of the sequence
  MISC_FEATURE (16)..(16): Xaa is phenylalanine, tyrosine, valine, leucine, isoleucine, methionine, or an amino acid residue which is covalently linked to another amino acid residue of the sequence
  MISC_FEATURE (17)..(17): Xaa is phenylalanine, tyrosine, valine, leucine, isoleucine, methionine, or an amino acid residue which is covalently linked to another amino acid residue of the sequence
  MISC_FEATURE (18)..(18): Xaa is alanine, valine, glycine, serine, or an amino acid residue which is covalently linked to another amino acid residue of the sequence
  MISC_FEATURE (19)..(19): Xaa is glutamic acid, aspartic acid, or an amino acid residue which is covalently linked to another amino acid residue of the sequence
  MISC_FEATURE (26)..(26): Xaa is glycine, alanine, serine, or an amino acid residue which is covalently linked to another amino acid residue of the sequence
  MISC_FEATURE (27)..(27): Xaa is alanine, valine, glycine, serine, or an amino acid residue which is covalently linked to another amino acid residue of the sequence
  MISC_FEATURE (28)..(28): Xaa is isoleucine, leucine, valine, phenylalanine, methionine, or an amino acid residue which is covalently linked to another amino acid residue of the sequence
  MISC_FEATURE (29)..(29): Xaa is isoleucine, leucine, valine, phenylalanine, methionine, or an amino acid residue which is covalently linked to another amino acid residue of the sequence
  MISC_FEATURE (30)..(30): Xaa is glycine, alanine, serine, or an amino acid residue which is covalently linked to another amino acid residue of the sequence
  MISC_FEATURE (31)..(31): Xaa is leucine, isoleucine, valine, phenylalanine, methionine, or an amino acid residue which is covalently linked to another amino acid residue of the sequence
  MISC_FEATURE (32)..(32): Xaa is methionine, valine, leucine, isoleucine, alanine, or an amino acid residue which is covalently linked to another amino acid residue of the sequence
  MISC_FEATURE (33)..(33): Xaa is valine, leucine, isoleucine, alanine, methionine, or an amino acid residue which is covalently linked to another amino acid residue of the sequence
  MISC_FEATURE (34)..(34): Xaa is glycine, alanine, serine, or an amino acid residue which is covalently linked to another amino acid residue of the sequence
  MISC_FEATURE (35)..(35): Xaa is glycine, alanine, serine, or an amino acid residue which is covalently linked to another amino acid residue of the sequence
  MISC_FEATURE (36)..(36): Xaa is valine, leucine, isoleucine, alanine, methionine, or an amino acid residue which is covalently linked to another amino acid residue of the sequence
FRHDSGYEXXXXXXXXXXXDVGSNKXXXXXXXXXXXVIA

SEQ ID NO: 395 - protein, 38 aa, Artificial Sequence
  synthetic
  MISC_FEATURE (8)..(8): Xaa is valine, leucine, isoleucine, alanine, methionine, or an amino acid residue which is covalently linked to another amino acid residue of the sequence
  MISC_FEATURE (9)..(9): Xaa is histidine, tyrosine, serine, methionine, or an amino acid residue which is covalently linked to another amino acid residue of the sequence
  MISC_FEATURE (10)..(10): Xaa is histidine, tyrosine, serine, methionine, or an amino acid residue which is covalently linked to another amino acid residue of the sequence
  MISC_FEATURE (11)..(11): Xaa is glutamine, asparagine, methionine, serine, or an amino acid which is covalently linked to another amino acid residue of the sequence
  MISC_FEATURE (12)..(12): Xaa is lysine, arginine, or an amino acid residue which is covalently linked to another amino acid residue of the sequence
  MISC_FEATURE (13)..(13): Xaa is leucine, isoleucine, valine, phenylalanine, methionine, or an amino acid residue which is covalently linked to another amino acid residue of the sequence
  MISC_FEATURE (14)..(14): Xaa is valine, leucine, isoleucine, alanine, methionine, or an amino acid residue which is covalently linked to another amino acid residue of the sequence
  MISC_FEATURE (15)..(15): Xaa is phenylalanine, tyrosine, valine, leucine, isoleucine, methionine, or an amino acid residue which is covalently linked to another amino acid residue of the sequence
  MISC_FEATURE (16)..(16): Xaa is phenylalanine, tyrosine, valine, leucine, isoleucine, methionine, or an amino acid residue which is covalently linked to another amino acid residue of the sequence
  MISC_FEATURE (17)..(17): Xaa is alanine, valine, glycine, serine, or an amino acid residue which is covalently linked to another amino acid residue of the sequence
  MISC_FEATURE (18)..(18): Xaa is glutamic acid, aspartic acid, or an amino acid residue which is covalently linked to another amino acid residue of the sequence
  MISC_FEATURE (25)..(25): Xaa is glycine, alanine, serine, or an amino acid residue which is covalently linked to another amino acid residue of the sequence
  MISC_FEATURE (26)..(26): Xaa is alanine, valine, glycine, serine, or an amino acid residue which is covalently linked to another amino acid residue of the sequence
  MISC_FEATURE (27)..(27): Xaa is isoleucine, leucine, valine, phenylalanine, methionine, or an amino acid residue which is covalently linked to another amino acid residue of the sequence
  MISC_FEATURE (28)..(28): Xaa is isoleucine, leucine, valine, phenylalanine, methionine, or an amino acid residue which is covalently linked to another amino acid residue of the sequence
  MISC_FEATURE (29)..(29): Xaa is glycine, alanine, serine, or an amino acid residue which is covalently linked to another amino acid residue of the sequence
  MISC_FEATURE (30)..(30): Xaa is leucine, isoleucine, valine, phenylalanine, methionine, or an amino acid residue which is covalently linked to another amino acid residue of the sequence
  MISC_FEATURE (31)..(31): Xaa is methionine, valine, leucine, isoleucine, alanine, or an amino acid residue which is covalently linked to another amino acid residue of the sequence
  MISC_FEATURE (32)..(32): Xaa is valine, leucine, isoleucine, alanine, methionine, or an amino acid residue which is covalently linked to another amino acid residue of the sequence
  MISC_FEATURE (33)..(33): Xaa is glycine, alanine, serine, or an amino acid residue which is covalently linked to another amino acid residue of the sequence
  MISC_FEATURE (34)..(34): Xaa is glycine, alanine, serine, or an amino acid residue which is covalently linked to another amino acid residue of the sequence
  MISC_FEATURE (35)..(35): Xaa is valine, leucine, isoleucine, alanine, methionine, or an amino acid residue which is covalently linked to another amino acid residue of the sequence
RHDSGYEXXXXXXXXXXXDVGSNKXXXXXXXXXXXVIA

SEQ ID NO: 396 - protein, 37 aa, Artificial Sequence
  synthetic
  MISC_FEATURE (7)..(7): Xaa is valine, leucine, isoleucine, alanine, methionine, or an amino acid residue which is covalently linked to another amino acid residue of the sequence
  MISC_FEATURE (8)..(8): Xaa is histidine, tyrosine, serine, methionine, or an amino acid residue which is covalently linked to another amino acid residue of the sequence
  MISC_FEATURE (9)..(9): Xaa is histidine, tyrosine, serine, methionine, or an amino acid residue which is covalently linked to another amino acid residue of the sequence
  MISC_FEATURE (10)..(10): Xaa is glutamine, asparagine, methionine, serine, or an amino acid which is covalently linked to another amino acid residue of the sequence
  MISC_FEATURE (11)..(11): Xaa is lysine, arginine, or an amino acid residue which is covalently linked to another amino acid residue of the sequence
  MISC_FEATURE (12)..(12): Xaa is leucine, isoleucine, valine, phenylalanine, methionine, or an amino acid residue which is covalently linked to another amino acid residue of the sequence
  MISC_FEATURE (13)..(13): Xaa is valine, leucine, isoleucine, alanine, methionine, or an amino acid residue which is covalently linked to another amino acid residue of the sequence
  MISC_FEATURE (14)..(14): Xaa is phenylalanine, tyrosine, valine, leucine, isoleucine, methionine, or an amino acid residue which is covalently linked to another amino acid residue of the sequence
  MISC_FEATURE (15)..(15): Xaa is phenylalanine, tyrosine, valine, leucine, isoleucine, methionine, or an amino acid residue which is covalently linked to another amino acid residue of the sequence
  MISC_FEATURE (16)..(16): Xaa is alanine, valine, glycine, serine, or an amino acid residue which is covalently linked to another amino acid residue of the sequence
  MISC_FEATURE (17)..(17): Xaa is glutamic acid, aspartic acid, or an amino acid residue which is covalently linked to another amino acid residue of the sequence
  MISC_FEATURE (24)..(24): Xaa is glycine, alanine, serine, or an amino acid residue which is covalently linked to another amino acid residue of the sequence
  MISC_FEATURE (25)..(25): Xaa is alanine, valine, glycine, serine, or an amino acid residue which is covalently linked to another amino acid residue of the sequence
  MISC_FEATURE (26)..(26): Xaa is isoleucine, leucine, valine, phenylalanine, methionine, or an amino acid residue which is covalently linked to another amino acid residue of the sequence
  MISC_FEATURE (27)..(27): Xaa is isoleucine, leucine, valine, phenylalanine, methionine, or an amino acid residue which is covalently linked to another amino acid residue of the sequence
  MISC_FEATURE (28)..(28): Xaa is glycine, alanine, serine, or an amino acid residue which is covalently linked to another amino acid residue of the sequence
  MISC_FEATURE (29)..(29): Xaa is leucine, isoleucine, valine, phenylalanine, methionine, or an amino acid residue which is covalently linked to another amino acid residue of the sequence
  MISC_FEATURE (30)..(30): Xaa is methionine, valine, leucine, isoleucine, alanine, or an amino acid residue which is covalently linked to another amino acid residue of the sequence
  MISC_FEATURE (31)..(31): Xaa is valine, leucine, isoleucine, alanine, methionine, or an amino acid residue which is covalently linked to another amino acid residue of the sequence
  MISC_FEATURE (32)..(32): Xaa is glycine, alanine, serine, or an amino acid residue which is covalently linked to another amino acid residue of the sequence
  MISC_FEATURE (33)..(33): Xaa is glycine, alanine, serine, or an amino acid residue which is covalently linked to another amino acid residue of the sequence
  MISC_FEATURE (34)..(34): Xaa is valine, leucine, isoleucine, alanine, methionine, or an amino acid residue which is covalently linked to another amino acid residue of the sequence
HDSGYEXXXXXXXXXXXDVGSNKXXXXXXXXXXXVIA

SEQ ID NO: 397 - protein, 36 aa, Artificial Sequence
  synthetic
  MISC_FEATURE (6)..(6): Xaa is valine, leucine, isoleucine, alanine, methionine, or an amino acid residue which is covalently linked to another amino acid residue of the sequence
  MISC_FEATURE (7)..(7): Xaa is histidine, tyrosine, serine, methionine, or an amino acid residue which is covalently linked to another amino acid residue of the sequence
  MISC_FEATURE (8)..(8): Xaa is histidine, tyrosine, serine, methionine, or an amino acid residue which is covalently linked to another amino acid residue of the sequence
  MISC_FEATURE (9)..(9): Xaa is glutamine, asparagine, methionine, serine, or an amino acid which is covalently linked to another amino acid residue of the sequence
  MISC_FEATURE (10)..(10): Xaa is lysine, arginine, or an amino acid residue which is covalently linked to another amino acid residue of the sequence
  MISC_FEATURE (11)..(11): Xaa is leucine, isoleucine, valine, phenylalanine, methionine, or an amino acid residue which is covalently linked to another amino acid residue of the sequence
  MISC_FEATURE (12)..(12): Xaa is valine, leucine, isoleucine, alanine, methionine, or an amino acid residue which is covalently linked to another amino acid residue of the sequence
  MISC_FEATURE (13)..(13): Xaa is phenylalanine, tyrosine, valine, leucine, isoleucine, methionine, or an amino acid residue which is covalently linked to another amino acid residue of the sequence
  MISC_FEATURE (14)..(14): Xaa is phenylalanine, tyrosine, valine, leucine, isoleucine, methionine, or an amino acid residue which is covalently linked to another amino acid residue of the sequence
  MISC_FEATURE (15)..(15): Xaa is alanine, valine, glycine, serine, or an amino acid residue which is covalently linked to another amino acid residue of the sequence
  MISC_FEATURE (16)..(16): Xaa is glutamic acid, aspartic acid, or an amino acid residue which is covalently linked to another amino acid residue of the sequence
  MISC_FEATURE (23)..(23): Xaa is glycine, alanine, serine, or an amino acid residue which is covalently linked to another amino acid residue of the sequence
  MISC_FEATURE (24)..(24): Xaa is alanine, valine, glycine, serine, or an amino acid residue which is covalently linked to another amino acid residue of the sequence
  MISC_FEATURE (25)..(25): Xaa is isoleucine, leucine, valine, phenylalanine, methionine, or an amino acid residue which is covalently linked to another amino acid residue of the sequence
  MISC_FEATURE (26)..(26): Xaa is isoleucine, leucine, valine, phenylalanine, methionine, or an amino acid residue which is covalently linked to another amino acid residue of the sequence
  MISC_FEATURE (27)..(27): Xaa is glycine, alanine, serine, or an amino acid residue which is covalently linked to another amino acid residue of the sequence
  MISC_FEATURE (28)..(28): Xaa is leucine, isoleucine, valine, phenylalanine, methionine, or an amino acid residue which is covalently linked to another amino acid residue of the sequence
  MISC_FEATURE (29)..(29): Xaa is methionine, valine, leucine, isoleucine, alanine, or an amino acid residue which is covalently linked to another amino acid residue of the sequence
  MISC_FEATURE (30)..(30): Xaa is valine, leucine, isoleucine, alanine, methionine, or an amino acid residue which is covalently linked to another amino acid residue of the sequence
  MISC_FEATURE (31)..(31): Xaa is glycine, alanine, serine, or an amino acid residue which is covalently linked to another amino acid residue of the sequence
  MISC_FEATURE (32)..(32): Xaa is glycine, alanine, serine, or an amino acid residue which is covalently linked to another amino acid residue of the sequence
  MISC_FEATURE (33)..(33): Xaa is valine, leucine, isoleucine, alanine, methionine, or an amino acid residue which is covalently linked to another amino acid residue of the sequence
DSGYEXXXXXXXXXXXDVGSNKXXXXXXXXXXXVIA

SEQ ID NO: 398 - protein, 35 aa, Artificial Sequence
  synthetic
  MISC_FEATURE (5)..(5): Xaa is valine, leucine, isoleucine, alanine, methionine, or an amino acid residue which is covalently linked to another amino acid residue of the sequence
  MISC_FEATURE (6)..(6): Xaa is histidine, tyrosine, serine, methionine, or an amino acid residue which is covalently linked to another amino acid residue of the sequence
  MISC_FEATURE (7)..(7): Xaa is histidine, tyrosine, serine, methionine, or an amino acid residue which is covalently linked to another amino acid residue of the sequence
  MISC_FEATURE (8)..(8): Xaa is glutamine, asparagine, methionine, serine, or an amino acid which is covalently linked to another amino acid residue of the sequence
  MISC_FEATURE (9)..(9): Xaa is lysine, arginine, or an amino acid residue which is covalently linked to another amino acid residue of the sequence
  MISC_FEATURE (10)..(10): Xaa is leucine, isoleucine, valine, phenylalanine, methionine, or an amino acid residue which is covalently linked to another amino acid residue of the sequence
  MISC_FEATURE (11)..(11): Xaa is valine, leucine, isoleucine, alanine, methionine, or an amino acid residue which is covalently linked to another amino acid residue of the sequence
  MISC_FEATURE (12)..(12): Xaa is phenylalanine, tyrosine, valine, leucine, isoleucine, methionine, or an amino acid residue which is covalently linked to another amino acid residue of the sequence
  MISC_FEATURE (13)..(13): Xaa is phenylalanine, tyrosine, valine, leucine, isoleucine, methionine, or an amino acid residue which is covalently linked to another amino acid residue of the sequence
  MISC_FEATURE (14)..(14): Xaa is alanine, valine, glycine, serine, or an amino acid residue which is covalently linked to another amino acid residue of the sequence
  MISC_FEATURE (15)..(15): Xaa is glutamic acid, aspartic acid, or an amino acid residue which is covalently linked to another amino acid residue of the sequence
  MISC_FEATURE (22)..(22): Xaa is glycine, alanine, serine, or an amino acid residue which is covalently linked to another amino acid residue of the sequence
  MISC_FEATURE (23)..(23): Xaa is alanine, valine, glycine, serine, or an amino acid residue which is covalently linked to another amino acid residue of the sequence
  MISC_FEATURE (24)..(24): Xaa is isoleucine, leucine, valine, phenylalanine, methionine, or an amino acid residue which is covalently linked to another amino acid residue of the sequence
  MISC_FEATURE (25)..(25): Xaa is isoleucine, leucine, valine, phenylalanine, methionine, or an amino acid residue which is covalently linked to another amino acid residue of the sequence
  MISC_FEATURE (26)..(26): Xaa is glycine, alanine, serine, or an amino acid residue which is covalently linked to another amino acid residue of the sequence
  MISC_FEATURE (27)..(27): Xaa is leucine, isoleucine, valine, phenylalanine, methionine, or an amino acid residue which is covalently linked to another amino acid residue of the sequence
  MISC_FEATURE (28)..(28): Xaa is methionine, valine, leucine, isoleucine, alanine, or an amino acid residue which is covalently linked to another amino acid residue of the sequence
  MISC_FEATURE (29)..(29): Xaa is valine, leucine, isoleucine, alanine, methionine, or an amino acid residue which is covalently linked to another amino acid residue of the sequence
  MISC_FEATURE (30)..(30): Xaa is glycine, alanine, serine, or an amino acid residue which is covalently linked to another amino acid residue of the sequence
  MISC_FEATURE (31)..(31): Xaa is glycine, alanine, serine, or an amino acid residue which is covalently linked to another amino acid residue of the sequence
  MISC_FEATURE (32)..(32): Xaa is valine, leucine, isoleucine, alanine, methionine, or an amino acid residue which is covalently linked to another amino acid residue of the sequence
SGYEXXXXXXXXXXXDVGSNKXXXXXXXXXXXVIA

SEQ ID NO: 399 - protein, 34 aa, Artificial Sequence
  synthetic
  MISC_FEATURE (4)..(4): Xaa is valine, leucine, isoleucine, alanine, methionine, or an amino acid residue which is covalently linked to another amino acid residue of the sequence
  MISC_FEATURE (5)..(5): Xaa is histidine, tyrosine, serine, methionine, or an amino acid residue which is covalently linked to another amino acid residue of the sequence
  MISC_FEATURE (6)..(6): Xaa is histidine, tyrosine, serine, methionine, or an amino acid residue which is covalently linked to another amino acid residue of the sequence
  MISC_FEATURE (7)..(7): Xaa is glutamine, asparagine, methionine, serine, or an amino acid which is covalently linked to another amino acid residue of the sequence
  MISC_FEATURE (8)..(8): Xaa is lysine, arginine, or an amino acid residue which is covalently linked to another amino acid residue of the sequence
  MISC_FEATURE (9)..(9): Xaa is leucine, isoleucine, valine, phenylalanine, methionine, or an amino acid residue which is covalently linked to another amino acid residue of the sequence
  MISC_FEATURE (10)..(10): Xaa is valine, leucine, isoleucine, alanine, methionine, or an amino acid residue which is covalently linked to another amino acid residue of the sequence
  MISC_FEATURE (11)..(11): Xaa is phenylalanine, tyrosine, valine, leucine, isoleucine, methionine, or an amino acid residue which is covalently linked to another amino acid residue of the sequence
  MISC_FEATURE (12)..(12): Xaa is phenylalanine, tyrosine, valine, leucine, isoleucine, methionine, or an amino acid residue which is covalently linked to another amino acid residue of the sequence
  MISC_FEATURE (13)..(13): Xaa is alanine, valine, glycine, serine, or an amino acid residue which is covalently linked to another amino acid residue of the sequence
  MISC_FEATURE (14)..(14): Xaa is glutamic acid, aspartic acid, or an amino acid residue which is covalently linked to another amino acid residue of the sequence
  MISC_FEATURE (21)..(21): Xaa is glycine, alanine, serine, or an amino acid residue which is covalently linked to another amino acid residue of the sequence
  MISC_FEATURE (22)..(22): Xaa is alanine, valine, glycine, serine, or an amino acid residue which is covalently linked to another amino acid residue of the sequence
  MISC_FEATURE (23)..(23): Xaa is isoleucine, leucine, valine, phenylalanine, methionine, or an amino acid residue which is covalently linked to another amino acid residue of the sequence
  MISC_FEATURE (24)..(24): Xaa is isoleucine, leucine, valine, phenylalanine, methionine, or an amino acid residue which is covalently linked to another amino acid residue of the sequence
  MISC_FEATURE (25)..(25): Xaa is glycine, alanine, serine, or an amino acid residue which is covalently linked to another amino acid residue of the sequence
  MISC_FEATURE (26)..(26): Xaa is leucine, isoleucine, valine, phenylalanine, methionine, or an amino acid residue which is covalently linked to another amino acid residue of the sequence
  MISC_FEATURE (27)..(27): Xaa is methionine, valine, leucine, isoleucine, alanine, or an amino acid residue which is covalently linked to another amino acid residue of the sequence
  MISC_FEATURE (28)..(28): Xaa is valine, leucine, isoleucine, alanine, methionine, or an amino acid residue which is covalently linked to another amino acid residue of the sequence
  MISC_FEATURE (29)..(29): Xaa is glycine, alanine, serine, or an amino acid residue which is covalently linked to another amino acid residue of the sequence
  MISC_FEATURE (30)..(30): Xaa is glycine, alanine, serine, or an amino acid residue which is covalently linked to another amino acid residue of the sequence
  MISC_FEATURE (31)..(31): Xaa is valine, leucine, isoleucine, alanine, methionine, or an amino acid residue which is covalently linked to another amino acid residue of the sequence
GYEXXXXXXXXXXXDVGSNKXXXXXXXXXXXVIA

SEQ ID NO: 400 - protein, 33 aa, Artificial Sequence
  synthetic
  MISC_FEATURE (3)..(3): Xaa is valine, leucine, isoleucine, alanine, methionine, or an amino acid residue which is covalently linked to another amino acid residue of the sequence
  MISC_FEATURE (4)..(4): Xaa is histidine, tyrosine, serine, methionine, or an amino acid residue which is covalently linked to another amino acid residue of the sequence
  MISC_FEATURE (5)..(5): Xaa is histidine, tyrosine, serine, methionine, or an amino acid residue which is covalently linked to another amino acid residue of the sequence
  MISC_FEATURE (6)..(6): Xaa is glutamine, asparagine, methionine, serine, or an amino acid which is covalently linked to another amino acid residue of the sequence
  MISC_FEATURE (7)..(7): Xaa is lysine, arginine, or an amino acid residue which is covalently linked to another amino acid residue of the sequence
  MISC_FEATURE (8)..(8): Xaa is leucine, isoleucine, valine, phenylalanine, methionine, or an amino acid residue which is covalently linked to another amino acid residue of the sequence
  MISC_FEATURE (9)..(9): Xaa is valine, leucine, isoleucine, alanine, methionine, or an amino acid residue which is covalently linked to another amino acid residue of the sequence
  MISC_FEATURE (10)..(10): Xaa is phenylalanine, tyrosine, valine, leucine, isoleucine, methionine, or an amino acid residue which is covalently linked to another amino acid residue of the sequence
  MISC_FEATURE (11)..(11): Xaa is phenylalanine, tyrosine, valine, leucine, isoleucine, methionine, or an amino acid residue which is covalently linked to another amino acid residue of the sequence
  MISC_FEATURE (12)..(12): Xaa is alanine, valine, glycine, serine, or an amino acid residue which is covalently linked to another amino acid residue of the sequence
  MISC_FEATURE (13)..(13): Xaa is glutamic acid, aspartic acid, or an amino acid residue which is covalently linked to another amino acid residue of the sequence
  MISC_FEATURE (20)..(20): Xaa is glycine, alanine, serine, or an amino acid residue which is covalently linked to another amino acid residue of the sequence
  MISC_FEATURE (21)..(21): Xaa is alanine, valine, glycine, serine, or an amino acid residue which is covalently linked to another amino acid residue of the sequence
  MISC_FEATURE (22)..(22): Xaa is isoleucine, leucine, valine, phenylalanine, methionine, or an amino acid residue which is covalently linked to another amino acid residue of the sequence
  MISC_FEATURE (23)..(23): Xaa is isoleucine, leucine, valine, phenylalanine, methionine, or an amino acid residue which is covalently linked to another amino acid residue of the sequence
  MISC_FEATURE (24)..(24): Xaa is glycine, alanine, serine, or an amino acid residue which is covalently linked to another amino acid residue of the sequence
  MISC_FEATURE (25)..(25): Xaa is leucine, isoleucine, valine, phenylalanine, methionine, or an amino acid residue which is covalently linked to another amino acid residue of the sequence
  MISC_FEATURE (26)..(26): Xaa is methionine, valine, leucine, isoleucine, alanine, or an amino acid residue which is covalently linked to another amino acid residue of the sequence
  MISC_FEATURE (27)..(27): Xaa is valine, leucine, isoleucine, alanine, methionine, or an amino acid residue which is covalently linked to another amino acid residue of the sequence
  MISC_FEATURE (28)..(28): Xaa is glycine, alanine, serine, or an amino acid residue which is covalently linked to another amino acid residue of the sequence
  MISC_FEATURE (29)..(29): Xaa is glycine, alanine, serine, or an amino acid residue which is covalently linked to another amino acid residue of the sequence
  MISC_FEATURE (30)..(30): Xaa is valine, leucine, isoleucine, alanine, methionine, or an amino acid residue which is covalently linked to another amino acid residue of the sequence
YEXXXXXXXXXXXDVGSNKXXXXXXXXXXXVIA

SEQ ID NO: 401 - protein, 32 aa, Artificial Sequence
  synthetic
  MISC_FEATURE (2)..(2): Xaa is valine, leucine, isoleucine, alanine, methionine, or an amino acid residue which is covalently linked to another amino acid residue of the sequence
  MISC_FEATURE (3)..(3): Xaa is histidine, tyrosine, serine, methionine, or an amino acid residue which is covalently linked to another amino acid residue of the sequence
  MISC_FEATURE (4)..(4): Xaa is histidine, tyrosine, serine, methionine, or an amino acid residue which is covalently linked to another amino acid residue of the sequence
  MISC_FEATURE (5)..(5): Xaa is glutamine, asparagine, methionine, serine, or an amino acid which is covalently linked to another amino acid residue of the sequence
  MISC_FEATURE (6)..(6): Xaa is lysine, arginine, or an amino acid residue which is covalently linked to another amino acid residue of the sequence
  MISC_FEATURE (7)..(7): Xaa is leucine, isoleucine, valine, phenylalanine, methionine, or an amino acid residue which is covalently linked to another amino acid residue of the sequence
  MISC_FEATURE (8)..(8): Xaa is valine, leucine, isoleucine, alanine, methionine, or an amino acid residue which is covalently linked to another amino acid residue of the sequence
  MISC_FEATURE (9)..(9): Xaa is phenylalanine, tyrosine, valine, leucine, isoleucine, methionine, or an amino acid residue which is covalently linked to another amino acid residue of the sequence
  MISC_FEATURE (10)..(10): Xaa is phenylalanine, tyrosine, valine, leucine, isoleucine, methionine, or an amino acid residue which is covalently linked to another amino acid residue of the sequence
  MISC_FEATURE (11)..(11): Xaa is alanine, valine, glycine, serine, or an amino acid residue which is covalently linked to another amino acid residue of the sequence
  MISC_FEATURE (12)..(12): Xaa is glutamic acid, aspartic acid, or an amino acid residue which is covalently linked to another amino acid residue of the sequence
  MISC_FEATURE (19)..(19): Xaa is glycine, alanine, serine, or an amino acid residue which is covalently linked to another amino acid residue of the sequence
  MISC_FEATURE (20)..(20): Xaa is alanine, valine, glycine, serine, or an amino acid residue which is covalently linked to another amino acid residue of the sequence
  MISC_FEATURE (21)..(21): Xaa is isoleucine, leucine, valine, phenylalanine, methionine, or an amino acid residue which is covalently linked to another amino acid residue of the sequence
  MISC_FEATURE (22)..(22): Xaa is isoleucine, leucine, valine, phenylalanine, methionine, or an amino acid residue which is covalently linked to another amino acid residue of the sequence
  MISC_FEATURE (23)..(23): Xaa is glycine, alanine, serine, or an amino acid residue which is covalently linked to another amino acid residue of the sequence
  MISC_FEATURE (24)..(24): Xaa is leucine, isoleucine, valine, phenylalanine, methionine, or an amino acid residue which is covalently linked to another amino acid residue of the sequence
  MISC_FEATURE (25)..(25): Xaa is methionine, valine, leucine, isoleucine, alanine, or an amino acid residue which is covalently linked to another amino acid residue of the sequence
  MISC_FEATURE (26)..(26): Xaa is valine, leucine, isoleucine, alanine, methionine, or an amino acid residue which is covalently linked to another amino acid residue of the sequence
  MISC_FEATURE (27)..(27): Xaa is glycine, alanine, serine, or an amino acid residue which is covalently linked to another amino acid residue of the sequence
  MISC_FEATURE (28)..(28): Xaa is glycine, alanine, serine, or an amino acid residue which is covalently linked to another amino acid residue of the sequence
  MISC_FEATURE (29)..(29): Xaa is valine, leucine, isoleucine, alanine, methionine, or an amino acid residue which is covalently linked to another amino acid residue of the sequence
EXXXXXXXXXXXDVGSNKXXXXXXXXXXXVIA

SEQ ID NO: 402 - protein, 31 aa, Artificial Sequence
  synthetic
  MISC_FEATURE (1)..(1): Xaa is valine, leucine, isoleucine, alanine, methionine, or an amino acid residue which is covalently linked to another amino acid residue of the sequence
  MISC_FEATURE (2)..(2): Xaa is histidine, tyrosine, serine, methionine, or an amino acid residue which is covalently linked to another amino acid residue of the sequence
  MISC_FEATURE (3)..(3): Xaa is histidine, tyrosine, serine, methionine, or an amino acid residue which is covalently linked to another amino acid residue of the sequence
  MISC_FEATURE (4)..(4): Xaa is glutamine, asparagine, methionine, serine, or an amino acid which is covalently linked to another amino acid residue of the sequence
  MISC_FEATURE (5)..(5): Xaa is lysine, arginine, or an amino acid residue which is covalently linked to another amino acid residue of the sequence
  MISC_FEATURE (6)..(6): Xaa is leucine, isoleucine, valine, phenylalanine, methionine, or an amino acid residue which is covalently linked to another amino acid residue of the sequence
  MISC_FEATURE (7)..(7): Xaa is valine, leucine, isoleucine, alanine, methionine, or an amino acid residue which is covalently linked to another amino acid residue of the sequence
  MISC_FEATURE (8)..(8): Xaa is phenylalanine, tyrosine, valine, leucine, isoleucine, methionine, or an amino acid residue which is covalently linked to another amino acid residue of the sequence
  MISC_FEATURE (9)..(9): Xaa is phenylalanine, tyrosine, valine, leucine, isoleucine, methionine, or an amino acid residue which is covalently linked to another amino acid residue of the sequence
  MISC_FEATURE (10)..(10): Xaa is alanine, valine, glycine, serine, or an amino acid residue which is covalently linked to another amino acid residue of the sequence
  MISC_FEATURE (11)..(11): Xaa is glutamic acid, aspartic acid, or an amino acid residue which is covalently linked to another amino acid residue of the sequence
  MISC_FEATURE (18)..(18): Xaa is glycine, alanine, serine, or an amino acid residue which is covalently linked to another amino acid residue of the sequence
  MISC_FEATURE (19)..(19): Xaa is alanine, valine, glycine, serine, or an amino acid residue which is covalently linked to another amino acid residue of the sequence
  MISC_FEATURE (20)..(20): Xaa is isoleucine, leucine, valine, phenylalanine, methionine, or an amino acid residue which is covalently linked to another amino acid residue of the sequence
  MISC_FEATURE (21)..(21): Xaa is isoleucine, leucine, valine, phenylalanine, methionine, or an amino acid residue which is covalently linked to another amino acid residue of the sequence
  MISC_FEATURE (22)..(22): Xaa is glycine, alanine, serine, or an amino acid residue which is covalently linked to another amino acid residue of the sequence
  MISC_FEATURE (23)..(23): Xaa is leucine, isoleucine, valine, phenylalanine, methionine, or an amino acid residue which is covalently linked to another amino acid residue of the sequence
  MISC_FEATURE (24)..(24): Xaa is methionine, valine, leucine, isoleucine, alanine, or an amino acid residue which is covalently linked to another amino acid residue of the sequence
  MISC_FEATURE (25)..(25): Xaa is valine, leucine, isoleucine, alanine, methionine, or an amino acid residue which is covalently linked to another amino acid residue of the sequence
  MISC_FEATURE (26)..(26): Xaa is glycine, alanine, serine, or an amino acid residue which is covalently linked to another amino acid residue of the sequence
  MISC_FEATURE (27)..(27): Xaa is glycine, alanine, serine, or an amino acid residue which is covalently linked to another amino acid residue of the sequence
  MISC_FEATURE (28)..(28): Xaa is valine, leucine, isoleucine, alanine, methionine, or an amino acid residue which is covalently linked to another amino acid residue of the sequence
XXXXXXXXXXXDVGSNKXXXXXXXXXXXVIA

SEQ ID NO: 403 - protein, 30 aa, Artificial Sequence
  synthetic
  MISC_FEATURE (1)..(1): Xaa is histidine, tyrosine, serine, methionine, or an amino acid residue which is covalently linked to another amino acid residue of the sequence
  MISC_FEATURE (2)..(2): Xaa is histidine, tyrosine, serine, methionine, or an amino acid residue which is covalently linked to another amino acid residue of the sequence
  MISC_FEATURE (3)..(3): Xaa is glutamine, asparagine, methionine, serine, or an amino acid which is covalently linked to another amino acid residue of the sequence
  MISC_FEATURE (4)..(4): Xaa is lysine, arginine, or an amino acid residue which is covalently linked to another amino acid residue of the sequence
  MISC_FEATURE (5)..(5): Xaa is leucine, isoleucine, valine, phenylalanine, methionine, or an amino acid residue which is covalently linked to another amino acid residue of the sequence
  MISC_FEATURE (6)..(6): Xaa is valine, leucine, isoleucine, alanine, methionine, or an amino acid residue which is covalently linked to another amino acid residue of the sequence
  MISC_FEATURE (7)..(7): Xaa is phenylalanine, tyrosine, valine, leucine, isoleucine, methionine, or an amino acid residue which is covalently linked to another amino acid residue of the sequence
  MISC_FEATURE (8)..(8): Xaa is phenylalanine, tyrosine, valine, leucine, isoleucine, methionine, or an amino acid residue which is covalently linked to another amino acid residue of the sequence
  MISC_FEATURE (9)..(9): Xaa is alanine, valine, glycine, serine, or an amino acid residue which is covalently linked to another amino acid residue of the sequence
  MISC_FEATURE (10)..(10): Xaa is glutamic acid, aspartic acid, or an amino acid residue which is covalently linked to another amino acid residue of the sequence
  MISC_FEATURE (17)..(17): Xaa is glycine, alanine, serine, or an amino acid residue which is covalently linked to another amino acid residue of the sequence
  MISC_FEATURE (18)..(18): Xaa is alanine, valine, glycine, serine, or an amino acid residue which is covalently linked to another amino acid residue of the sequence
  MISC_FEATURE (19)..(19): Xaa is isoleucine, leucine, valine, phenylalanine, methionine, or an amino acid residue which is covalently linked to another amino acid residue of the sequence
  MISC_FEATURE (20)..(20): Xaa is isoleucine, leucine, valine, phenylalanine, methionine, or an amino acid residue which is covalently linked to another amino acid residue of the sequence
  MISC_FEATURE (21)..(21): Xaa is glycine, alanine, serine, or an amino acid residue which is covalently linked to another amino acid residue of the sequence
  MISC_FEATURE (22)..(22): Xaa is leucine, isoleucine, valine, phenylalanine, methionine, or an amino acid residue which is covalently linked to another amino acid residue of the sequence
  MISC_FEATURE (23)..(23): Xaa is methionine, valine, leucine, isoleucine, alanine, or an amino acid residue which is covalently linked to another amino acid residue of the sequence
  MISC_FEATURE (24)..(24): Xaa is valine, leucine, isoleucine, alanine, methionine, or an amino acid residue which is covalently linked to another amino acid residue of the sequence
  MISC_FEATURE (25)..(25): Xaa is glycine, alanine, serine, or an amino acid residue which is covalently linked to another amino acid residue of the sequence
  MISC_FEATURE (26)..(26): Xaa is glycine, alanine, serine, or an amino acid residue which is covalently linked to another amino acid residue of the sequence
XXXXXXXXXXDVGSNKXXXXXXXXXXVVIA

SEQ ID NO: 404 - protein, 29 aa, Artificial Sequence
  synthetic
  MISC_FEATURE (1)..(1): Xaa is histidine, tyrosine, serine, methionine, or an amino acid residue which is covalently linked to another amino acid residue of the sequence
  MISC_FEATURE (2)..(2): Xaa is glutamine, asparagine, methionine, serine, or an amino acid which is covalently linked to another amino acid residue of the sequence
  MISC_FEATURE (3)..(3): Xaa is lysine, arginine, or an amino acid residue which is covalently linked to another amino acid residue of the sequence
  MISC_FEATURE (4)..(4): Xaa is leucine, isoleucine, valine, phenylalanine, methionine, or an amino acid residue which is covalently linked to another amino acid residue of the sequence
  MISC_FEATURE (5)..(5): Xaa is valine, leucine, isoleucine, alanine, methionine, or an amino acid residue which is covalently linked to another amino acid residue of the sequence
  MISC_FEATURE (6)..(6): Xaa is phenylalanine, tyrosine, valine, leucine, isoleucine, methionine, or an amino acid residue which is covalently linked to another amino acid residue of the sequence
  MISC_FEATURE (7)..(7): Xaa is phenylalanine, tyrosine, valine, leucine, isoleucine, methionine, or an amino acid residue which is covalently linked to another amino acid residue of the sequence
  MISC_FEATURE (8)..(8): Xaa is alanine, valine, glycine, serine, or an amino acid residue which is covalently linked to another amino acid residue of the sequence
  MISC_FEATURE (9)..(9): Xaa is glutamic acid, aspartic acid, or an amino acid residue which is covalently linked to another amino acid residue of the sequence
  MISC_FEATURE (16)..(16): Xaa is glycine, alanine, serine, or an amino acid residue which is covalently linked to another amino acid residue of the sequence
  MISC_FEATURE (17)..(17): Xaa is alanine, valine, glycine, serine, or an amino acid residue which is covalently linked to another amino acid residue of the sequence
  MISC_FEATURE (18)..(18): Xaa is isoleucine, leucine, valine, phenylalanine, methionine, or an amino acid residue which is covalently linked to another amino acid residue of the sequence
  MISC_FEATURE (19)..(19): Xaa is isoleucine, leucine, valine, phenylalanine, methionine, or an amino acid residue which is covalently linked to another amino acid residue of the sequence
  MISC_FEATURE (20)..(20): Xaa is glycine, alanine, serine, or an amino acid residue which is covalently linked to another amino acid residue of the sequence
  MISC_FEATURE (21)..(21): Xaa is leucine, isoleucine, valine, phenylalanine, methionine, or an amino acid residue which is covalently linked to another amino acid residue of the sequence
  MISC_FEATURE (22)..(22): Xaa is methionine, valine, leucine, isoleucine, alanine, or an amino acid residue which is covalently linked to another amino acid residue of the sequence
  MISC_FEATURE (23)..(23): Xaa is valine, leucine, isoleucine, alanine, methionine, or an amino acid residue which is covalently linked to another amino acid residue of the sequence
  MISC_FEATURE (24)..(24): Xaa is glycine, alanine, serine, or an amino acid residue which is covalently linked to another amino acid residue of the sequence
XXXXXXXXXDVGSNKXXXXXXXXXGVVIA

SEQ ID NO: 405 - protein, 28 aa, Artificial Sequence
  synthetic
  MISC_FEATURE (1)..(1): Xaa is glutamine, asparagine, methionine, serine, or an amino acid which is covalently linked to another amino acid residue of the sequence
  MISC_FEATURE (2)..(2): Xaa is lysine, arginine, or an amino acid residue which is covalently linked to another amino acid residue of the sequence
  MISC_FEATURE (3)..(3): Xaa is leucine, isoleucine, valine, phenylalanine, methionine, or an amino acid residue which is covalently linked to another amino acid residue of the sequence
  MISC_FEATURE (4)..(4): Xaa is valine, leucine, isoleucine, alanine, methionine, or an amino acid residue which is covalently linked to another amino acid residue of the sequence
  MISC_FEATURE (5)..(5): Xaa is phenylalanine, tyrosine, valine, leucine, isoleucine, methionine, or an amino acid residue which is covalently linked to another amino acid residue of the sequence
  MISC_FEATURE (6)..(6): Xaa is phenylalanine, tyrosine, valine, leucine, isoleucine, methionine, or an amino acid residue which is covalently linked to another amino acid residue of the sequence
  MISC_FEATURE (7)..(7): Xaa is alanine, valine, glycine, serine, or an amino acid residue which is covalently linked to another amino acid residue of the sequence
  MISC_FEATURE (8)..(8): Xaa is glutamic acid, aspartic acid, or an amino acid residue which is covalently linked to another amino acid residue of the sequence
  MISC_FEATURE (15)..(15): Xaa is glycine, alanine, serine, or an amino acid residue which is covalently linked to another amino acid residue of the sequence
  MISC_FEATURE (16)..(16): Xaa is alanine, valine, glycine, serine, or an amino acid residue which is covalently linked to another amino acid residue of the sequence
  MISC_FEATURE (17)..(17): Xaa is isoleucine, leucine, valine, phenylalanine, methionine, or an amino acid residue which is covalently linked to another amino acid residue of the sequence
  MISC_FEATURE (18)..(18): Xaa is isoleucine, leucine, valine, phenylalanine, methionine, or an amino acid residue which is covalently linked to another amino acid residue of the sequence
  MISC_FEATURE (19)..(19): Xaa is glycine, alanine, serine, or an amino acid residue which is covalently linked to another amino acid residue of the sequence
  MISC_FEATURE (20)..(20): Xaa is leucine, isoleucine, valine, phenylalanine, methionine, or an amino acid residue which is covalently linked to another amino acid residue of the sequence
  MISC_FEATURE (21)..(21): Xaa is methionine, valine, leucine, isoleucine, alanine, or an amino acid residue which is covalently linked to another amino acid residue of the sequence
  MISC_FEATURE (22)..(22): Xaa is valine, leucine, isoleucine, alanine, methionine, or an amino acid residue which is covalently linked to another amino acid residue of the sequence
XXXXXXXXDVGSNKXXXXXXXXGGVVIA

SEQ ID NO: 406 - protein, 27 aa, Artificial Sequence
  synthetic
  MISC_FEATURE (1)..(1): Xaa is lysine, arginine, or an amino acid residue which is covalently linked to another amino acid residue of the sequence
  MISC_FEATURE (2)..(2): Xaa is leucine, isoleucine, valine, phenylalanine, methionine, or an amino acid residue which is covalently linked to another amino acid residue of the sequence
  MISC_FEATURE (3)..(3): Xaa is valine, leucine, isoleucine, alanine, methionine, or an amino acid residue which is covalently linked to another amino acid residue of the sequence
  MISC_FEATURE (4)..(4): Xaa is phenylalanine, tyrosine, valine, leucine, isoleucine, methionine, or an amino acid residue which is covalently linked to another amino acid residue of the sequence
  MISC_FEATURE (5)..(5): Xaa is phenylalanine, tyrosine, valine, leucine, isoleucine, methionine, or an amino acid residue which is covalently linked to another amino acid residue of the sequence
  MISC_FEATURE (6)..(6): Xaa is alanine, valine, glycine, serine, or an amino acid residue which is covalently linked to another amino acid residue of the sequence
  MISC_FEATURE (7)..(7): Xaa is glutamic acid, aspartic acid, or an amino acid residue which is covalently linked to another amino acid residue of the sequence
  MISC_FEATURE (14)..(14): Xaa is glycine, alanine, serine, or an amino acid residue which is covalently linked to another amino acid residue of the sequence
  MISC_FEATURE (15)..(15): Xaa is alanine, valine, glycine, serine, or an amino acid residue which is covalently linked to another amino acid residue of the sequence
  MISC_FEATURE (16)..(16): Xaa is isoleucine, leucine, valine, phenylalanine, methionine, or an amino acid residue which is covalently linked to another amino acid residue of the sequence
  MISC_FEATURE (17)..(17): Xaa is isoleucine, leucine, valine, phenylalanine, methionine, or an amino acid residue which is covalently linked to another amino acid residue of the sequence
  MISC_FEATURE (18)..(18): Xaa is glycine, alanine, serine, or an amino acid residue which is covalently linked to another amino acid residue of the sequence
  MISC_FEATURE (19)..(19): Xaa is leucine, isoleucine, valine, phenylalanine, methionine, or an amino acid residue which is covalently linked to another amino acid residue of the sequence
  MISC_FEATURE (20)..(20): Xaa is methionine, valine, leucine, isoleucine, alanine, or an amino acid residue which is covalently linked to another amino acid residue of the sequence
XXXXXXXDVGSNKXXXXXXXVGGVVIA

SEQ ID NO: 407 - protein, 26 aa, Artificial Sequence
  synthetic
  MISC_FEATURE (1)..(1): Xaa is leucine, isoleucine, valine, phenylalanine, methionine, or an amino acid residue which is covalently linked to another amino acid residue of the sequence
  MISC_FEATURE (2)..(2): Xaa is valine, leucine, isoleucine, alanine, methionine, or an amino acid residue which is covalently linked to another amino acid residue of the sequence
  MISC_FEATURE (3)..(3): Xaa is phenylalanine, tyrosine, valine, leucine, isoleucine, methionine, or an amino acid residue which is covalently linked to another amino acid residue of the sequence
  MISC_FEATURE (4)..(4): Xaa is phenylalanine, tyrosine, valine, leucine, isoleucine, methionine, or an amino acid residue which is covalently linked to another amino acid residue of the sequence
  MISC_FEATURE (5)..(5): Xaa is alanine, valine, glycine, serine, or an amino acid residue which is covalently linked to another amino acid residue of the sequence
  MISC_FEATURE (6)..(6): Xaa is glutamic acid, aspartic acid, or an amino acid residue which is covalently linked to another amino acid residue of the sequence
  MISC_FEATURE (13)..(13): Xaa is glycine, alanine, serine, or an amino acid residue which is covalently linked to another amino acid residue of the sequence
  MISC_FEATURE (14)..(14): Xaa is alanine, valine, glycine, serine, or an amino acid residue which is covalently linked to another amino acid residue of the sequence
  MISC_FEATURE (15)..(15): Xaa is isoleucine, leucine, valine, phenylalanine, methionine, or an amino acid residue which is covalently linked to another amino acid residue of the sequence
  MISC_FEATURE (16)..(16): Xaa is isoleucine, leucine, valine, phenylalanine, methionine, or an amino acid residue which is covalently linked to another amino acid residue of the sequence
  MISC_FEATURE (17)..(17): Xaa is glycine, alanine, serine, or an amino acid residue which is covalently linked to another amino acid residue of the sequence
  MISC_FEATURE (18)..(18): Xaa is leucine, isoleucine, valine, phenylalanine, methionine, or an amino acid residue which is covalently linked to another amino acid residue of the sequence
XXXXXXDVGSNKXXXXXXMVGGVVIA

SEQ ID NO: 408 - protein, 25 aa, Artificial Sequence
  synthetic
  MISC_FEATURE (1)..(1): Xaa is valine, leucine, isoleucine, alanine, methionine, or an amino acid residue which is covalently linked to another amino acid residue of the sequence
  MISC_FEATURE (2)..(2): Xaa is phenylalanine, tyrosine, valine, leucine, isoleucine, methionine, or an amino acid residue which is covalently linked to another amino acid residue of the sequence
  MISC_FEATURE (3)..(3): Xaa is phenylalanine, tyrosine, valine, leucine, isoleucine, methionine, or an amino acid residue which is covalently linked to another amino acid residue of the sequence
  MISC_FEATURE (4)..(4): Xaa is alanine, valine, glycine, serine, or an amino acid residue which is covalently linked to another amino acid residue of the sequence
  MISC_FEATURE (5)..(5): Xaa is glutamic acid, aspartic acid, or an amino acid residue which is covalently linked to another amino acid residue of the sequence
  MISC_FEATURE (12)..(12): Xaa is glycine, alanine, serine, or an amino acid residue which is covalently linked to another amino acid residue of the sequence
  MISC_FEATURE (13)..(13): Xaa is alanine, valine, glycine, serine, or an amino acid residue which is covalently linked to another amino acid residue of the sequence
  MISC_FEATURE (14)..(14): Xaa is isoleucine, leucine, valine, phenylalanine, methionine, or an amino acid residue which is covalently linked to another amino acid residue of the sequence
  MISC_FEATURE (15)..(15): Xaa is isoleucine, leucine, valine, phenylalanine, methionine, or an amino acid residue which is covalently linked to another amino acid residue of the sequence
  MISC_FEATURE (16)..(16): Xaa is glycine, alanine, serine, or an amino acid residue which is covalently linked to another amino acid residue of the sequence
XXXXXDVGSNKXXXXXLMVGGVVIA

SEQ ID NO: 409 - protein, 24 aa, Artificial Sequence
  synthetic
  MISC_FEATURE (1)..(1): Xaa is phenylalanine, tyrosine, valine, leucine, isoleucine, methionine, or an amino acid residue which is covalently linked to another amino acid residue of the sequence
  MISC_FEATURE (2)..(2): Xaa is phenylalanine, tyrosine, valine, leucine, isoleucine, methionine, or an amino acid residue which is covalently linked to another amino acid residue of the sequence
  MISC_FEATURE (3)..(3): Xaa is alanine, valine, glycine, serine, or an amino acid residue which is covalently linked to another amino acid residue of the sequence
  MISC_FEATURE (4)..(4): Xaa is glutamic acid, aspartic acid, or an amino acid residue which is covalently linked to another amino acid residue of the sequence
  MISC_FEATURE (11)..(11): Xaa is glycine, alanine, serine, or an amino acid residue which is covalently linked to another amino acid residue of the sequence
  MISC_FEATURE (12)..(12): Xaa is alanine, valine, glycine, serine, or an amino acid residue which is covalently linked to another amino acid residue of the sequence
  MISC_FEATURE (13)..(13): Xaa is isoleucine, leucine, valine, phenylalanine, methionine, or an amino acid residue which is covalently linked to another amino acid residue of the sequence
  MISC_FEATURE (14)..(14): Xaa is isoleucine, leucine, valine, phenylalanine, methionine, or an amino acid residue which is covalently linked to another amino acid residue of the sequence
XXXXDVGSNKXXXXGLMVGGVVIA

SEQ ID NO: 410 - protein, 23 aa, Artificial Sequence
  synthetic
  MISC_FEATURE (1)..(1): Xaa is phenylalanine, tyrosine, valine, leucine, isoleucine, methionine, or an amino acid residue which is covalently linked to another amino acid residue of the sequence
  MISC_FEATURE (2)..(2): Xaa is alanine, valine, glycine, serine, or an amino acid residue which is covalently linked to another amino acid residue of the sequence
  MISC_FEATURE (3)..(3): Xaa is glutamic acid, aspartic acid, or an amino acid residue which is covalently linked to another amino acid residue of the sequence
  MISC_FEATURE (10)..(10): Xaa is glycine, alanine, serine, or an amino acid residue which is covalently linked to another amino acid residue of the sequence
  MISC_FEATURE (11)..(11): Xaa is alanine, valine, glycine, serine, or an amino acid residue which is covalently linked to another amino acid residue of the sequence
  MISC_FEATURE (12)..(12): Xaa is isoleucine, leucine, valine, phenylalanine, methionine, or an amino acid residue which is covalently linked to another amino acid residue of the sequence
XXXDVGSNKXXXIGLMVGGVVIA

SEQ ID NO: 411 - protein, 22 aa, Artificial Sequence
  synthetic
  MISC_FEATURE (1)..(1): Xaa is alanine, valine, glycine, serine, or an amino acid residue which is covalently linked to another amino acid residue of the sequence
  MISC_FEATURE (2)..(2): Xaa is glutamic acid, aspartic acid, or an amino acid residue which is covalently linked to another amino acid residue of the sequence
  MISC_FEATURE (9)..(9): Xaa is glycine, alanine, serine, or an amino acid residue which is covalently linked to another amino acid residue of the sequence
  MISC_FEATURE (10)..(10): Xaa is alanine, valine, glycine, serine, or an amino acid residue which is covalently linked to another amino acid residue of the sequence
XXDVGSNKXXIIGLMVGGVVIA

SEQ ID NO: 412 - protein, 21 aa, Artificial Sequence
  synthetic
  MISC_FEATURE (1)..(1): Xaa is glutamic acid, aspartic acid, or an amino acid residue which is covalently linked to another amino acid residue of the sequence
  MISC_FEATURE (8)..(8): Xaa is glycine, alanine, serine, or an amino acid residue which is covalently linked to another amino acid residue of the sequence
XDVGSNKXAIIGLMVGGVVIA

SEQ ID NO: 413 - protein, 41 aa, Artificial Sequence
  synthetic
  MISC_FEATURE (12)..(12): Xaa is valine, leucine, isoleucine, alanine, methionine, or an amino acid residue which is covalently linked to another amino acid residue of the sequence
  MISC_FEATURE (13)..(13): Xaa is histidine, tyrosine, serine, methionine, or an amino acid residue which is covalently linked to another amino acid residue of the sequence
  MISC_FEATURE (14)..(14): Xaa is histidine, tyrosine, serine, methionine, or an amino acid residue which is covalently linked to another amino acid residue of the sequence
  MISC_FEATURE (15)..(15): Xaa is glutamine, asparagine, methionine, serine, or an amino acid which is covalently linked to another amino acid residue of the sequence
  MISC_FEATURE (16)..(16): Xaa is lysine, arginine, or an amino acid residue which is covalently linked to another amino acid residue of the sequence
  MISC_FEATURE (17)..(17): Xaa is leucine, isoleucine, valine, phenylalanine, methionine, or an amino acid residue which is covalently linked to another amino acid residue of the sequence
  MISC_FEATURE (18)..(18): Xaa is valine, leucine, isoleucine, alanine, methionine, or an amino acid residue which is covalently linked to another amino acid residue of the sequence
  MISC_FEATURE (19)..(19): Xaa is phenylalanine, tyrosine, valine, leucine, isoleucine, methionine, or an amino acid residue which is covalently linked to another amino acid residue of the sequence
  MISC_FEATURE (20)..(20): Xaa is phenylalanine, tyrosine, valine, leucine, isoleucine, methionine, or an amino acid residue which is covalently linked to another amino acid residue of the sequence
  MISC_FEATURE (21)..(21): Xaa is alanine, valine, glycine, serine, or an amino acid residue which is covalently linked to another amino acid residue of the sequence
  MISC_FEATURE (22)..(22): Xaa is glutamic acid, aspartic acid, or an amino acid residue which is covalently linked to another amino acid residue of the sequence
  MISC_FEATURE (29)..(29): Xaa is glycine, alanine, serine, or an amino acid residue which is covalently linked to another amino acid residue of the sequence
  MISC_FEATURE (30)..(30): Xaa is alanine, valine, glycine, serine, or an amino acid residue which is covalently linked to another amino acid residue of the sequence
  MISC_FEATURE (31)..(31): Xaa is isoleucine, leucine, valine, phenylalanine, methionine, or an amino acid residue which is covalently linked to another amino acid residue of the sequence
  MISC_FEATURE (32)..(32): Xaa is isoleucine, leucine, valine, phenylalanine, methionine, or an amino acid residue which is covalently linked to another amino acid residue of the sequence
  MISC_FEATURE (33)..(33): Xaa is glycine, alanine, serine, or an amino acid residue which is covalently linked to another amino acid residue of the sequence
  MISC_FEATURE (34)..(34): Xaa is leucine, isoleucine, valine, phenylalanine, methionine, or an amino acid residue which is covalently linked to another amino acid residue of the sequence
  MISC_FEATURE (35)..(35): Xaa is methionine, valine, leucine, isoleucine, alanine, or an amino acid residue which is covalently linked to another amino acid residue of the sequence
  MISC_FEATURE (36)..(36): Xaa is valine, leucine, isoleucine, alanine, methionine, or an amino acid residue which is covalently linked to another amino acid residue of the sequence
  MISC_FEATURE (37)..(37): Xaa is glycine, alanine, serine, or an amino acid residue which is covalently linked to another amino acid residue of the sequence
  MISC_FEATURE (38)..(38): Xaa is glycine, alanine, serine, or an amino acid residue which is covalently linked to another amino acid residue of the sequence
  MISC_FEATURE (39)..(39): Xaa is valine, leucine, isoleucine, alanine, methionine, or an amino acid residue which is covalently linked to another amino acid residue of the sequence
DAEFRHDSGYEXXXXXXXXXXXDVGSNKXXXXXXXXXXXVI

SEQ ID NO: 414 - protein, 40 aa, Artificial Sequence
  synthetic
  MISC_FEATURE (11)..(11): Xaa is valine, leucine, isoleucine, alanine, methionine, or an amino acid residue which is covalently linked to another amino acid residue of the sequence
  MISC_FEATURE (12)..(12): Xaa is histidine, tyrosine, serine, methionine, or an amino acid residue which is covalently linked to another amino acid residue of the sequence
  MISC_FEATURE (13)..(13): Xaa is histidine, tyrosine, serine, methionine, or an amino acid residue which is covalently linked to another amino acid residue of the sequence
  MISC_FEATURE (14)..(14): Xaa is glutamine, asparagine, methionine, serine, or an amino acid which is covalently linked to another amino acid residue of the sequence
  MISC_FEATURE (15)..(15): Xaa is lysine, arginine, or an amino acid residue which is covalently linked to another amino acid residue of the sequence
  MISC_FEATURE (16)..(16): Xaa is leucine, isoleucine, valine, phenylalanine, methionine, or an amino acid residue which is covalently linked to another amino acid residue of the sequence
  MISC_FEATURE (17)..(17): Xaa is valine, leucine, isoleucine, alanine, methionine, or an amino acid residue which is covalently linked to another amino acid residue of the sequence
  MISC_FEATURE (18)..(18): Xaa is phenylalanine, tyrosine, valine, leucine, isoleucine, methionine, or an amino acid residue which is covalently linked to another amino acid residue of the sequence
  MISC_FEATURE (19)..(19): Xaa is phenylalanine, tyrosine, valine, leucine, isoleucine, methionine, or an amino acid residue which is covalently linked to another amino acid residue of the sequence
  MISC_FEATURE (20)..(20): Xaa is alanine, valine, glycine, serine, or an amino acid residue which is covalently linked to another amino acid residue of the sequence
  MISC_FEATURE (21)..(21): Xaa is glutamic acid, aspartic acid, or an amino acid residue which is covalently linked to another amino acid residue of the sequence
  MISC_FEATURE (28)..(28): Xaa is glycine, alanine, serine, or an amino acid residue which is covalently linked to another amino acid residue of the sequence
  MISC_FEATURE (29)..(29): Xaa is alanine, valine, glycine, serine, or an amino acid residue which is covalently linked to another amino acid residue of the sequence
  MISC_FEATURE (30)..(30): Xaa is isoleucine, leucine, valine, phenylalanine, methionine, or an amino acid residue which is covalently linked to another amino acid residue of the sequence
  MISC_FEATURE (31)..(31): Xaa is isoleucine, leucine, valine, phenylalanine, methionine, or an amino acid residue which is covalently linked to another amino acid residue of the sequence
  MISC_FEATURE (32)..(32): Xaa is glycine, alanine, serine, or an amino acid residue which is covalently linked to another amino acid residue of the sequence
  MISC_FEATURE (33)..(33): Xaa is leucine, isoleucine, valine, phenylalanine, methionine, or an amino acid residue which is covalently linked to another amino acid residue of the sequence
  MISC_FEATURE (34)..(34): Xaa is methionine, valine, leucine, isoleucine, alanine, or an amino acid residue which is covalently linked to another amino acid residue of the sequence
  MISC_FEATURE (35)..(35): Xaa is valine, leucine, isoleucine, alanine, methionine, or an amino acid residue which is covalently linked to another amino acid residue of the sequence
  MISC_FEATURE (36)..(36): Xaa is glycine, alanine, serine, or an amino acid residue which is covalently linked to another amino acid residue of the sequence
  MISC_FEATURE (37)..(37): Xaa is glycine, alanine, serine, or an amino acid residue which is covalently linked to another amino acid residue of the sequence
  MISC_FEATURE (38)..(38): Xaa is valine, leucine, isoleucine, alanine, methionine, or an amino acid residue which is covalently linked to another amino acid residue of the sequence
AEFRHDSGYEXXXXXXXXXXXDVGSNKXXXXXXXXXXXVI

SEQ ID NO: 415 - protein, 39 aa, Artificial Sequence
  synthetic
  MISC_FEATURE (10)..(10): Xaa is valine, leucine, isoleucine, alanine, methionine, or an amino acid residue which is covalently linked to another amino acid residue of the sequence
  MISC_FEATURE (11)..(11): Xaa is histidine, tyrosine, serine, methionine, or an amino acid residue which is covalently linked to another amino acid residue of the sequence
  MISC_FEATURE (12)..(12): Xaa is histidine, tyrosine, serine, methionine, or an amino acid residue which is covalently linked to another amino acid residue of the sequence
  MISC_FEATURE (13)..(13): Xaa is glutamine, asparagine, methionine, serine, or an amino acid which is covalently linked to another amino acid residue of the sequence
  MISC_FEATURE (14)..(14): Xaa is lysine, arginine, or an amino acid residue which is covalently linked to another amino acid residue of the sequence
  MISC_FEATURE (15)..(15): Xaa is leucine, isoleucine, valine, phenylalanine, methionine, or an amino acid residue which is covalently linked to another amino acid residue of the sequence
  MISC_FEATURE (16)..(16): Xaa is valine, leucine, isoleucine, alanine, methionine, or an amino acid residue which is covalently linked to another amino acid residue of the sequence
  MISC_FEATURE (17)..(17): Xaa is phenylalanine, tyrosine, valine, leucine, isoleucine, methionine, or an amino acid residue which is covalently linked to another amino acid residue of the sequence
  MISC_FEATURE (18)..(18): Xaa is phenylalanine, tyrosine, valine, leucine, isoleucine, methionine, or an amino acid residue which is covalently linked to another amino acid residue of the sequence
  MISC_FEATURE (19)..(19): Xaa is alanine, valine, glycine, serine, or an amino acid residue which is covalently linked to another amino acid residue of the sequence
  MISC_FEATURE (20)..(20): Xaa is glutamic acid, aspartic acid, or an amino acid residue which is covalently linked to another amino acid residue of the sequence
  MISC_FEATURE (27)..(27): Xaa is glycine, alanine, serine, or an amino acid residue which is covalently linked to another amino acid residue of the sequence
  MISC_FEATURE (28)..(28): Xaa is alanine, valine, glycine, serine, or an amino acid residue which is covalently linked to another amino acid residue of the sequence
  MISC_FEATURE (29)..(29): Xaa is isoleucine, leucine, valine, phenylalanine, methionine, or an amino acid residue which is covalently linked to another amino acid residue of the sequence
  MISC_FEATURE (30)..(30): Xaa is isoleucine, leucine, valine, phenylalanine, methionine, or an amino acid residue which is covalently linked to another amino acid residue of the sequence
  MISC_FEATURE (31)..(31): Xaa is glycine, alanine, serine, or an amino acid residue which is covalently linked to another amino acid residue of the sequence
  MISC_FEATURE (32)..(32): Xaa is leucine, isoleucine, valine, phenylalanine, methionine, or an amino acid residue which is covalently linked to another amino acid residue of the sequence
  MISC_FEATURE (33)..(33): Xaa is methionine, valine, leucine, isoleucine, alanine, or an amino acid residue which is covalently linked to another amino acid residue of the sequence
  MISC_FEATURE (34)..(34): Xaa is valine, leucine, isoleucine, alanine, methionine, or an amino acid residue which is covalently linked to another amino acid residue of the sequence
  MISC_FEATURE (35)..(35): Xaa is glycine, alanine, serine, or an amino acid residue which is covalently linked to another amino acid residue of the sequence
  MISC_FEATURE (36)..(36): Xaa is glycine, alanine, serine, or an amino acid residue which is covalently linked to another amino acid residue of the sequence
  MISC_FEATURE (37)..(37): Xaa is valine, leucine, isoleucine, alanine, methionine, or an amino acid residue which is covalently linked to another amino acid residue of the sequence
EFRHDSGYEXXXXXXXXXXXDVGSNKXXXXXXXXXXXVI

SEQ ID NO: 416 - protein, 38 aa, Artificial Sequence
  synthetic
  MISC_FEATURE (9)..(9): Xaa is valine, leucine, isoleucine, alanine, methionine, or an amino acid residue which is covalently linked to another amino acid residue of the sequence
  MISC_FEATURE (10)..(10): Xaa is histidine, tyrosine, serine, methionine, or an amino acid residue which is covalently linked to another amino acid residue of the sequence
  MISC_FEATURE (11)..(11): Xaa is histidine, tyrosine, serine, methionine, or an amino acid residue which is covalently linked to another amino acid residue of the sequence
  MISC_FEATURE (12)..(12): Xaa is glutamine, asparagine, methionine, serine, or an amino acid which is covalently linked to another amino acid residue of the sequence
  MISC_FEATURE (13)..(13): Xaa is lysine, arginine, or an amino acid residue which is covalently linked to another amino acid residue of the sequence
  MISC_FEATURE (14)..(14): Xaa is leucine, isoleucine, valine, phenylalanine, methionine, or an amino acid residue which is covalently linked to another amino acid residue of the sequence
  MISC_FEATURE (15)..(15): Xaa is valine, leucine, isoleucine, alanine, methionine, or an amino acid residue which is covalently linked to another amino acid residue of the sequence
  MISC_FEATURE (16)..(16): Xaa is phenylalanine, tyrosine, valine, leucine, isoleucine, methionine, or an amino acid residue which is covalently linked to another amino acid residue of the sequence
  MISC_FEATURE (17)..(17): Xaa is phenylalanine, tyrosine, valine, leucine, isoleucine, methionine, or an amino acid residue which is covalently linked to another amino acid residue of the sequence
  MISC_FEATURE (18)..(18): Xaa is alanine, valine, glycine, serine, or an amino acid residue which is covalently linked to another amino acid residue of the sequence
  MISC_FEATURE (19)..(19): Xaa is glutamic acid, aspartic acid, or an amino acid residue which is covalently linked to another amino acid residue of the sequence
  MISC_FEATURE (26)..(26): Xaa is glycine, alanine, serine, or an amino acid residue which is covalently linked to another amino acid residue of the sequence
  MISC_FEATURE (27)..(27): Xaa is alanine, valine, glycine, serine, or an amino acid residue which is covalently linked to another amino acid residue of the sequence
  MISC_FEATURE (28)..(28): Xaa is isoleucine, leucine, valine, phenylalanine, methionine, or an amino acid residue which is covalently linked to another amino acid residue of the sequence
  MISC_FEATURE (29)..(29): Xaa is isoleucine, leucine, valine, phenylalanine, methionine, or an amino acid residue which is covalently linked to another amino acid residue of the sequence
  MISC_FEATURE (30)..(30): Xaa is glycine, alanine, serine, or an amino acid residue which is covalently linked to another amino acid residue of the sequence
  MISC_FEATURE (31)..(31): Xaa is leucine, isoleucine, valine, phenylalanine, methionine, or an amino acid residue which is covalently linked to another amino acid residue of the sequence
  MISC_FEATURE (32)..(32): Xaa is methionine, valine, leucine, isoleucine, alanine, or an amino acid residue which is covalently linked to another amino acid residue of the sequence
  MISC_FEATURE (33)..(33): Xaa is valine, leucine, isoleucine, alanine, methionine, or an amino acid residue which is covalently linked to another amino acid residue of the sequence
  MISC_FEATURE (34)..(34): Xaa is glycine, alanine, serine, or an amino acid residue which is covalently linked to another amino acid residue of the sequence
  MISC_FEATURE (35)..(35): Xaa is glycine, alanine, serine, or an amino acid residue which is covalently linked to another amino acid residue of the sequence
  MISC_FEATURE (36)..(36): Xaa is valine, leucine, isoleucine, alanine, methionine, or an amino acid residue which is covalently linked to another amino acid residue of the sequence
FRHDSGYEXXXXXXXXXXXDVGSNKXXXXXXXXXXXVI

SEQ ID NO: 417 - protein, 37 aa, Artificial Sequence
  synthetic
  MISC_FEATURE (8)..(8): Xaa is valine, leucine, isoleucine, alanine, methionine, or an amino acid residue which is covalently linked to another amino acid residue of the sequence
  MISC_FEATURE (9)..(9): Xaa is histidine, tyrosine, serine, methionine, or an amino acid residue which is covalently linked to another amino acid residue of the sequence
  MISC_FEATURE (10)..(10): Xaa is histidine, tyrosine, serine, methionine, or an amino acid residue which is covalently linked to another amino acid residue of the sequence
  MISC_FEATURE (11)..(11): Xaa is glutamine, asparagine, methionine, serine, or an amino acid which is covalently linked to another amino acid residue of the sequence
  MISC_FEATURE (12)..(12): Xaa is lysine, arginine, or an amino acid residue which is covalently linked to another amino acid residue of the sequence
  MISC_FEATURE (13)..(13): Xaa is leucine, isoleucine, valine, phenylalanine, methionine, or an amino acid residue which is covalently linked to another amino acid residue of the sequence
  MISC_FEATURE (14)..(14): Xaa is valine, leucine, isoleucine, alanine, methionine, or an amino acid residue which is covalently linked to another amino acid residue of the sequence
  MISC_FEATURE (15)..(15): Xaa is phenylalanine, tyrosine, valine, leucine, isoleucine, methionine, or an amino acid residue which is covalently linked to another amino acid residue of the sequence
  MISC_FEATURE (16)..(16): Xaa is phenylalanine, tyrosine, valine, leucine, isoleucine, methionine, or an amino acid residue which is covalently linked to another amino acid residue of the sequence
  MISC_FEATURE (17)..(17): Xaa is alanine, valine, glycine, serine, or an amino acid residue which is covalently linked to another amino acid residue of the sequence
  MISC_FEATURE (18)..(18): Xaa is glutamic acid, aspartic acid, or an amino acid residue which is covalently linked to another amino acid residue of the sequence
  MISC_FEATURE (25)..(25): Xaa is glycine, alanine, serine, or an amino acid residue which is covalently linked to another amino acid residue of the sequence
  MISC_FEATURE (26)..(26): Xaa is alanine, valine, glycine, serine, or an amino acid residue which is covalently linked to another amino acid residue of the sequence
  MISC_FEATURE (27)..(27): Xaa is isoleucine, leucine, valine, phenylalanine, methionine, or an amino acid residue which is covalently linked to another amino acid residue of the sequence
  MISC_FEATURE (28)..(28): Xaa is isoleucine, leucine, valine, phenylalanine, methionine, or an amino acid residue which is covalently linked to another amino acid residue of the sequence
  MISC_FEATURE (29)..(29): Xaa is glycine, alanine, serine, or an amino acid residue which is covalently linked to another amino acid residue of the sequence
  MISC_FEATURE (30)..(30): Xaa is leucine, isoleucine, valine, phenylalanine, methionine, or an amino acid residue which is covalently linked to another amino acid residue of the sequence
  MISC_FEATURE (31)..(31): Xaa is methionine, valine, leucine, isoleucine, alanine, or an amino acid residue which is covalently linked to another amino acid residue of the sequence
  MISC_FEATURE (32)..(32): Xaa is valine, leucine, isoleucine, alanine, methionine, or an amino acid residue which is covalently linked to another amino acid residue of the sequence
  MISC_FEATURE (33)..(33): Xaa is glycine, alanine, serine, or an amino acid residue which is covalently linked to another amino acid residue of the sequence
  MISC_FEATURE (34)..(34): Xaa is glycine, alanine, serine, or an amino acid residue which is covalently linked to another amino acid residue of the sequence
  MISC_FEATURE (35)..(35): Xaa is valine, leucine, isoleucine, alanine, methionine, or an amino acid residue which is covalently linked to another amino acid residue of the sequence
RHDSGYEXXXXXXXXXXXDVGSNKXXXXXXXXXXXVI

SEQ ID NO: 418 - protein, 36 aa, Artificial Sequence
  synthetic
  MISC_FEATURE (7)..(7): Xaa is valine, leucine, isoleucine, alanine, methionine, or an amino acid residue which is covalently linked to another amino acid residue of the sequence
  MISC_FEATURE (8)..(8): Xaa is histidine, tyrosine, serine, methionine, or an amino acid residue which is covalently linked to another amino acid residue of the sequence
  MISC_FEATURE (9)..(9): Xaa is histidine, tyrosine, serine, methionine, or an amino acid residue which is covalently linked to another amino acid residue of the sequence
  MISC_FEATURE (10)..(10): Xaa is glutamine, asparagine, methionine, serine, or an amino acid which is covalently linked to another amino acid residue of the sequence
  MISC_FEATURE (11)..(11): Xaa is lysine, arginine, or an amino acid residue which is covalently linked to another amino acid residue of the sequence
  MISC_FEATURE (12)..(12): Xaa is leucine, isoleucine, valine, phenylalanine, methionine, or an amino acid residue which is covalently linked to another amino acid residue of the sequence
  MISC_FEATURE (13)..(13): Xaa is valine, leucine, isoleucine, alanine, methionine, or an amino acid residue which is covalently linked to another amino acid residue of the sequence
  MISC_FEATURE (14)..(14): Xaa is phenylalanine, tyrosine, valine, leucine, isoleucine, methionine, or an amino acid residue which is covalently linked to another amino acid residue of the sequence
  MISC_FEATURE (15)..(15): Xaa is phenylalanine, tyrosine, valine, leucine, isoleucine, methionine, or an amino acid residue which is covalently linked to another amino acid residue of the sequence
  MISC_FEATURE (16)..(16): Xaa is alanine, valine, glycine, serine, or an amino acid residue which is covalently linked to another amino acid residue of the sequence
  MISC_FEATURE (17)..(17): Xaa is glutamic acid, aspartic acid, or an amino acid residue which is covalently linked to another amino acid residue of the sequence
  MISC_FEATURE (24)..(24): Xaa is glycine, alanine, serine, or an amino acid residue which is covalently linked to another amino acid residue of the sequence
  MISC_FEATURE (25)..(25): Xaa is alanine, valine, glycine, serine, or an amino acid residue which is covalently linked to another amino acid residue of the sequence
  MISC_FEATURE (26)..(26): Xaa is isoleucine, leucine, valine, phenylalanine, methionine, or an amino acid residue which is covalently linked to another amino acid residue of the sequence
  MISC_FEATURE (27)..(27): Xaa is isoleucine, leucine, valine, phenylalanine, methionine, or an amino acid residue which is covalently linked to another amino acid residue of the sequence
  MISC_FEATURE (28)..(28): Xaa is glycine, alanine, serine, or an amino acid residue which is covalently linked to another amino acid residue of the sequence
  MISC_FEATURE (29)..(29): Xaa is leucine, isoleucine, valine, phenylalanine, methionine, or an amino acid residue which is covalently linked to another amino acid residue of the sequence
  MISC_FEATURE (30)..(30): Xaa is methionine, valine, leucine, isoleucine, alanine, or an amino acid residue which is covalently linked to another amino acid residue of the sequence
  MISC_FEATURE (31)..(31): Xaa is valine, leucine, isoleucine, alanine, methionine, or an amino acid residue which is covalently linked to another amino acid residue of the sequence
  MISC_FEATURE (32)..(32): Xaa is glycine, alanine, serine, or an amino acid residue which is covalently linked to another amino acid residue of the sequence
  MISC_FEATURE (33)..(33): Xaa is glycine, alanine, serine, or an amino acid residue which is covalently linked to another amino acid residue of the sequence
  MISC_FEATURE (34)..(34): Xaa is valine, leucine, isoleucine, alanine, methionine, or an amino acid residue which is covalently linked to another amino acid residue of the sequence
HDSGYEXXXXXXXXXXXDVGSNKXXXXXXXXXXXVI

SEQ ID NO: 419 - protein, 35 aa, Artificial Sequence
  synthetic
  MISC_FEATURE (6)..(6): Xaa is valine, leucine, isoleucine, alanine, methionine, or an amino acid residue which is covalently linked to another amino acid residue of the sequence
  MISC_FEATURE (7)..(7): Xaa is histidine, tyrosine, serine, methionine, or an amino acid residue which is covalently linked to another amino acid residue of the sequence
  MISC_FEATURE (8)..(8): Xaa is histidine, tyrosine, serine, methionine, or an amino acid residue which is covalently linked to another amino acid residue of the sequence
  MISC_FEATURE (9)..(9): Xaa is glutamine, asparagine, methionine, serine, or an amino acid which is covalently linked to another amino acid residue of the sequence
  MISC_FEATURE (10)..(10): Xaa is lysine, arginine, or an amino acid residue which is covalently linked to another amino acid residue of the sequence
  MISC_FEATURE (11)..(11): Xaa is leucine, isoleucine, valine, phenylalanine, methionine, or an amino acid residue which is covalently linked to another amino acid residue of the sequence
  MISC_FEATURE (12)..(12): Xaa is valine, leucine, isoleucine, alanine, methionine, or an amino acid residue which is covalently linked to another amino acid residue of the sequence
  MISC_FEATURE (13)..(13): Xaa is phenylalanine, tyrosine, valine, leucine, isoleucine, methionine, or an amino acid residue which is covalently linked to another amino acid residue of the sequence
  MISC_FEATURE (14)..(14): Xaa is phenylalanine, tyrosine, valine, leucine, isoleucine, methionine, or an amino acid residue which is covalently linked to another amino acid residue of the sequence
  MISC_FEATURE (15)..(15): Xaa is alanine, valine, glycine, serine, or an amino acid residue which is covalently linked to another amino acid residue of the sequence
  MISC_FEATURE (16)..(16): Xaa is glutamic acid, aspartic acid, or an amino acid residue which is covalently linked to another amino acid residue of the sequence
  MISC_FEATURE (23)..(23): Xaa is glycine, alanine, serine, or an amino acid residue which is covalently linked to another amino acid residue of the sequence
  MISC_FEATURE (24)..(24): Xaa is alanine, valine, glycine, serine, or an amino acid residue which is covalently linked to another amino acid residue of the sequence
  MISC_FEATURE (25)..(25): Xaa is isoleucine, leucine, valine, phenylalanine, methionine, or an amino acid residue which is covalently linked to another amino acid residue of the sequence
  MISC_FEATURE (26)..(26): Xaa is isoleucine, leucine, valine, phenylalanine, methionine, or an amino acid residue which is covalently linked to another amino acid residue of the sequence
  MISC_FEATURE (27)..(27): Xaa is glycine, alanine, serine, or an amino acid residue which is covalently linked to another amino acid residue of the sequence
  MISC_FEATURE (28)..(28): Xaa is leucine, isoleucine, valine, phenylalanine, methionine, or an amino acid residue which is covalently linked to another amino acid residue of the sequence
  MISC_FEATURE (29)..(29): Xaa is methionine, valine, leucine, isoleucine, alanine, or an amino acid residue which is covalently linked to another amino acid residue of the sequence
  MISC_FEATURE (30)..(30): Xaa is valine, leucine, isoleucine, alanine, methionine, or an amino acid residue which is covalently linked to another amino acid residue of the sequence
  MISC_FEATURE (31)..(31): Xaa is glycine, alanine, serine, or an amino acid residue which is covalently linked to another amino acid residue of the sequence
  MISC_FEATURE (32)..(32): Xaa is glycine, alanine, serine, or an amino acid residue which is covalently linked to another amino acid residue of the sequence
  MISC_FEATURE (33)..(33): Xaa is valine, leucine, isoleucine, alanine, methionine, or an amino acid residue which is covalently linked to another amino acid residue of the sequence
DSGYEXXXXXXXXXXXDVGSNKXXXXXXXXXXXVI

SEQ ID NO: 420 - protein, 34 aa, Artificial Sequence
  synthetic
  MISC_FEATURE (5)..(5): Xaa is valine, leucine, isoleucine, alanine, methionine, or an amino acid residue which is covalently linked to another amino acid residue of the sequence
  MISC_FEATURE (6)..(6): Xaa is histidine, tyrosine, serine, methionine, or an amino acid residue which is covalently linked to another amino acid residue of the sequence
  MISC_FEATURE (7)..(7): Xaa is histidine, tyrosine, serine, methionine, or an amino acid residue which is covalently linked to another amino acid residue of the sequence
  MISC_FEATURE (8)..(8): Xaa is glutamine, asparagine, methionine, serine, or an amino acid which is covalently linked to another amino acid residue of the sequence
  MISC_FEATURE (9)..(9): Xaa is lysine, arginine, or an amino acid residue which is covalently linked to another amino acid residue of the sequence
  MISC_FEATURE (10)..(10): Xaa is leucine, isoleucine, valine, phenylalanine, methionine, or an amino acid residue which is covalently linked to another amino acid residue of the sequence
  MISC_FEATURE (11)..(11): Xaa is valine, leucine, isoleucine, alanine, methionine, or an amino acid residue which is covalently linked to another amino acid residue of the sequence
  MISC_FEATURE (12)..(12): Xaa is phenylalanine, tyrosine, valine, leucine, isoleucine, methionine, or an amino acid residue which is covalently linked to another amino acid residue of the sequence
  MISC_FEATURE (13)..(13): Xaa is phenylalanine, tyrosine, valine, leucine, isoleucine, methionine, or an amino acid residue which is covalently linked to another amino acid residue of the sequence
  MISC_FEATURE (14)..(14): Xaa is alanine, valine, glycine, serine, or an amino acid residue which is covalently linked to another amino acid residue of the sequence
  MISC_FEATURE (15)..(15): Xaa is glutamic acid, aspartic acid, or an amino acid residue which is covalently linked to another amino acid residue of the sequence
  MISC_FEATURE (22)..(22): Xaa is glycine, alanine, serine, or an amino acid residue which is covalently linked to another amino acid residue of the sequence
  MISC_FEATURE (23)..(23): Xaa is alanine, valine, glycine, serine, or an amino acid residue which is covalently linked to another amino acid residue of the sequence
  MISC_FEATURE (24)..(24): Xaa is isoleucine, leucine, valine, phenylalanine, methionine, or an amino acid residue which is covalently linked to another amino acid residue of the sequence
  MISC_FEATURE (25)..(25): Xaa is isoleucine, leucine, valine, phenylalanine, methionine, or an amino acid residue which is covalently linked to another amino acid residue of the sequence
  MISC_FEATURE (26)..(26): Xaa is glycine, alanine, serine, or an amino acid residue which is covalently linked to another amino acid residue of the sequence
  MISC_FEATURE (27)..(27): Xaa is leucine, isoleucine, valine, phenylalanine, methionine, or an amino acid residue which is covalently linked to another amino acid residue of the sequence
  MISC_FEATURE (28)..(28): Xaa is methionine, valine, leucine, isoleucine, alanine, or an amino acid residue which is covalently linked to another amino acid residue of the sequence
  MISC_FEATURE (29)..(29): Xaa is valine, leucine, isoleucine, alanine, methionine, or an amino acid residue which is covalently linked to another amino acid residue of the sequence
  MISC_FEATURE (30)..(30): Xaa is glycine, alanine, serine, or an amino acid residue which is covalently linked to another amino acid residue of the sequence
  MISC_FEATURE (31)..(31): Xaa is glycine, alanine, serine, or an amino acid residue which is covalently linked to another amino acid residue of the sequence
  MISC_FEATURE (32)..(32): Xaa is valine, leucine, isoleucine, alanine, methionine, or an amino acid residue which is covalently linked to another amino acid residue of the sequence
SGYEXXXXXXXXXXXDVGSNKXXXXXXXXXXXVI

SEQ ID NO: 421 - protein, 33 aa, Artificial Sequence
  synthetic
  MISC_FEATURE (4)..(4): Xaa is valine, leucine, isoleucine, alanine, methionine, or an amino acid residue which is covalently linked to another amino acid residue of the sequence
  MISC_FEATURE (5)..(5): Xaa is histidine, tyrosine, serine, methionine, or an amino acid residue which is covalently linked to another amino acid residue of the sequence
  MISC_FEATURE (6)..(6): Xaa is histidine, tyrosine, serine, methionine, or an amino acid residue which is covalently linked to another amino acid residue of the sequence
  MISC_FEATURE (7)..(7): Xaa is glutamine, asparagine, methionine, serine, or an amino acid which is covalently linked to another amino acid residue of the sequence
  MISC_FEATURE (8)..(8): Xaa is lysine, arginine, or an amino acid residue which is covalently linked to another amino acid residue of the sequence
  MISC_FEATURE (9)..(9): Xaa is leucine, isoleucine, valine, phenylalanine, methionine, or an amino acid residue which is covalently linked to another amino acid residue of the sequence
  MISC_FEATURE (10)..(10): Xaa is valine, leucine, isoleucine, alanine, methionine, or an amino acid residue which is covalently linked to another amino acid residue of the sequence
  MISC_FEATURE (11)..(11): Xaa is phenylalanine, tyrosine, valine, leucine, isoleucine, methionine, or an amino acid residue which is covalently linked to another amino acid residue of the sequence
  MISC_FEATURE (12)..(12): Xaa is phenylalanine, tyrosine, valine, leucine, isoleucine, methionine, or an amino acid residue which is covalently linked to another amino acid residue of the sequence
  MISC_FEATURE (13)..(13): Xaa is alanine, valine, glycine, serine, or an amino acid residue which is covalently linked to another amino acid residue of the sequence
  MISC_FEATURE (14)..(14): Xaa is glutamic acid, aspartic acid, or an amino acid residue which is covalently linked to another amino acid residue of the sequence
  MISC_FEATURE (21)..(21): Xaa is glycine, alanine, serine, or an amino acid residue which is covalently linked to another amino acid residue of the sequence
  MISC_FEATURE (22)..(22): Xaa is alanine, valine, glycine, serine, or an amino acid residue which is covalently linked to another amino acid residue of the sequence
  MISC_FEATURE (23)..(23): Xaa is isoleucine, leucine, valine, phenylalanine, methionine, or an amino acid residue which is covalently linked to another amino acid residue of the sequence
  MISC_FEATURE (24)..(24): Xaa is isoleucine, leucine, valine, phenylalanine, methionine, or an amino acid residue which is covalently linked to another amino acid residue of the sequence
  MISC_FEATURE (25)..(25): Xaa is glycine, alanine, serine, or an amino acid residue which is covalently linked to another amino acid residue of the sequence
  MISC_FEATURE (26)..(26): Xaa is leucine, isoleucine, valine, phenylalanine, methionine, or an amino acid residue which is covalently linked to another amino acid residue of the sequence
  MISC_FEATURE (27)..(27): Xaa is methionine, valine, leucine, isoleucine, alanine, or an amino acid residue which is covalently linked to another amino acid residue of the sequence
  MISC_FEATURE (28)..(28): Xaa is valine, leucine, isoleucine, alanine, methionine, or an amino acid residue which is covalently linked to another amino acid residue of the sequence
  MISC_FEATURE (29)..(29): Xaa is glycine, alanine, serine, or an amino acid residue which is covalently linked to another amino acid residue of the sequence
  MISC_FEATURE (30)..(30): Xaa is glycine, alanine, serine, or an amino acid residue which is covalently linked to another amino acid residue of the sequence
  MISC_FEATURE (31)..(31): Xaa is valine, leucine, isoleucine, alanine, methionine, or an amino acid residue which is covalently linked to another amino acid residue of the sequence
GYEXXXXXXXXXXXDVGSNKXXXXXXXXXXXVI

SEQ ID NO: 422 - protein, 32 aa, Artificial Sequence
  synthetic
  MISC_FEATURE (3)..(3): Xaa is valine, leucine, isoleucine, alanine, methionine, or an amino acid residue which is covalently linked to another amino acid residue of the sequence
  MISC_FEATURE (4)..(4): Xaa is histidine, tyrosine, serine, methionine, or an amino acid residue which is covalently linked to another amino acid residue of the sequence
  MISC_FEATURE (5)..(5): Xaa is histidine, tyrosine, serine, methionine, or an amino acid residue which is covalently linked to another amino acid residue of the sequence
  MISC_FEATURE (6)..(6): Xaa is glutamine, asparagine, methionine, serine, or an amino acid which is covalently linked to another amino acid residue of the sequence
  MISC_FEATURE (7)..(7): Xaa is lysine, arginine, or an amino acid residue which is covalently linked to another amino acid residue of the sequence
  MISC_FEATURE (8)..(8): Xaa is leucine, isoleucine, valine, phenylalanine, methionine, or an amino acid residue which is covalently linked to another amino acid residue of the sequence
  MISC_FEATURE (9)..(9): Xaa is valine, leucine, isoleucine, alanine, methionine, or an amino acid residue which is covalently linked to another amino acid residue of the sequence
  MISC_FEATURE (10)..(10): Xaa is phenylalanine, tyrosine, valine, leucine, isoleucine, methionine, or an amino acid residue which is covalently linked to another amino acid residue of the sequence
  MISC_FEATURE (11)..(11): Xaa is phenylalanine, tyrosine, valine, leucine, isoleucine, methionine, or an amino acid residue which is covalently linked to another amino acid residue of the sequence
  MISC_FEATURE (12)..(12): Xaa is alanine, valine, glycine, serine, or an amino acid residue which is covalently linked to another amino acid residue of the sequence
  MISC_FEATURE (13)..(13): Xaa is glutamic acid, aspartic acid, or an amino acid residue which is covalently linked to another amino acid residue of the sequence
  MISC_FEATURE (20)..(20): Xaa is glycine, alanine, serine, or an amino acid residue which is covalently linked to another amino acid residue of the sequence
  MISC_FEATURE (21)..(21): Xaa is alanine, valine, glycine, serine, or an amino acid residue which is covalently linked to another amino acid residue of the sequence
  MISC_FEATURE (22)..(22): Xaa is isoleucine, leucine, valine, phenylalanine, methionine, or an amino acid residue which is covalently linked to another amino acid residue of the sequence
  MISC_FEATURE (23)..(23): Xaa is isoleucine, leucine, valine, phenylalanine, methionine, or an amino acid residue which is covalently linked to another amino acid residue of the sequence
  MISC_FEATURE (24)..(24): Xaa is glycine, alanine, serine, or an amino acid residue which is covalently linked to another amino acid residue of the sequence
  MISC_FEATURE (25)..(25): Xaa is leucine, isoleucine, valine, phenylalanine, methionine, or an amino acid residue which is covalently linked to another amino acid residue of the sequence
  MISC_FEATURE (26)..(26): Xaa is methionine, valine, leucine, isoleucine, alanine, or an amino acid residue which is covalently linked to another amino acid residue of the sequence
  MISC_FEATURE (27)..(27): Xaa is valine, leucine, isoleucine, alanine, methionine, or an amino acid residue which is covalently linked to another amino acid residue of the sequence
  MISC_FEATURE (28)..(28): Xaa is glycine, alanine, serine, or an amino acid residue which is covalently linked to another amino acid residue of the sequence
  MISC_FEATURE (29)..(29): Xaa is glycine, alanine, serine, or an amino acid residue which is covalently linked to another amino acid residue of the sequence
  MISC_FEATURE (30)..(30): Xaa is valine, leucine, isoleucine, alanine, methionine, or an amino acid residue which is covalently linked to another amino acid residue of the sequence
YEXXXXXXXXXXXDVGSNKXXXXXXXXXXXVI

SEQ ID NO: 423 - protein, 31 aa, Artificial Sequence
  synthetic
  MISC_FEATURE (2)..(2): Xaa is valine, leucine, isoleucine, alanine, methionine, or an amino acid residue which is covalently linked to another amino acid residue of the sequence
  MISC_FEATURE (3)..(3): Xaa is histidine, tyrosine, serine, methionine, or an amino acid residue which is covalently linked to another amino acid residue of the sequence
  MISC_FEATURE (4)..(4): Xaa is histidine, tyrosine, serine, methionine, or an amino acid residue which is covalently linked to another amino acid residue of the sequence
  MISC_FEATURE (5)..(5): Xaa is glutamine, asparagine, methionine, serine, or an amino acid which is covalently linked to another amino acid residue of the sequence
  MISC_FEATURE (6)..(6): Xaa is lysine, arginine, or an amino acid residue which is covalently linked to another amino acid residue of the sequence
  MISC_FEATURE (7)..(7): Xaa is leucine, isoleucine, valine, phenylalanine, methionine, or an amino acid residue which is covalently linked to another amino acid residue of the sequence
  MISC_FEATURE (8)..(8): Xaa is valine, leucine, isoleucine, alanine, methionine, or an amino acid residue which is covalently linked to another amino acid residue of the sequence
  MISC_FEATURE (9)..(9): Xaa is phenylalanine, tyrosine, valine, leucine, isoleucine, methionine, or an amino acid residue which is covalently linked to another amino acid residue of the sequence
  MISC_FEATURE (10)..(10): Xaa is phenylalanine, tyrosine, valine, leucine, isoleucine, methionine, or an amino acid residue which is covalently linked to another amino acid residue of the sequence
  MISC_FEATURE (11)..(11): Xaa is alanine, valine, glycine, serine, or an amino acid residue which is covalently linked to another amino acid residue of the sequence
  MISC_FEATURE (12)..(12): Xaa is glutamic acid, aspartic acid, or an amino acid residue which is covalently linked to another amino acid residue of the sequence
  MISC_FEATURE (19)..(19): Xaa is glycine, alanine, serine, or an amino acid residue which is covalently linked to another amino acid residue of the sequence
  MISC_FEATURE (20)..(20): Xaa is alanine, valine, glycine, serine, or an amino acid residue which is covalently linked to another amino acid residue of the sequence
  MISC_FEATURE (21)..(21): Xaa is isoleucine, leucine, valine, phenylalanine, methionine, or an amino acid residue which is covalently linked to another amino acid residue of the sequence
  MISC_FEATURE (22)..(22): Xaa is isoleucine, leucine, valine, phenylalanine, methionine, or an amino acid residue which is covalently linked to another amino acid residue of the sequence
  MISC_FEATURE (23)..(23): Xaa is glycine, alanine, serine, or an amino acid residue which is covalently linked to another amino acid residue of the sequence
  MISC_FEATURE (24)..(24): Xaa is leucine, isoleucine, valine, phenylalanine, methionine, or an amino acid residue which is covalently linked to another amino acid residue of the sequence
  MISC_FEATURE (25)..(25): Xaa is methionine, valine, leucine, isoleucine, alanine, or an amino acid residue which is covalently linked to another amino acid residue of the sequence
  MISC_FEATURE (26)..(26): Xaa is valine, leucine, isoleucine, alanine, methionine, or an amino acid residue which is covalently linked to another amino acid residue of the sequence
  MISC_FEATURE (27)..(27): Xaa is glycine, alanine, serine, or an amino acid residue which is covalently linked to another amino acid residue of the sequence
  MISC_FEATURE (28)..(28): Xaa is glycine, alanine, serine, or an amino acid residue which is covalently linked to another amino acid residue of the sequence
  MISC_FEATURE (29)..(29): Xaa is valine, leucine, isoleucine, alanine, methionine, or an amino acid residue which is covalently linked to another amino acid residue of the sequence
EXXXXXXXXXXXDVGSNKXXXXXXXXXXXVI

SEQ ID NO: 424 - protein, 30 aa, Artificial Sequence
  synthetic
  MISC_FEATURE (1)..(1): Xaa is valine, leucine, isoleucine, alanine, methionine, or an amino acid residue which is covalently linked to another amino acid residue of the sequence
  MISC_FEATURE (2)..(2): Xaa is histidine, tyrosine, serine, methionine, or an amino acid residue which is covalently linked to another amino acid residue of the sequence
  MISC_FEATURE (3)..(3): Xaa is histidine, tyrosine, serine, methionine, or an amino acid residue which is covalently linked to another amino acid residue of the sequence
  MISC_FEATURE (4)..(4): Xaa is glutamine, asparagine, methionine, serine, or an amino acid which is covalently linked to another amino acid residue of the sequence
  MISC_FEATURE (5)..(5): Xaa is lysine, arginine, or an amino acid residue which is covalently linked to another amino acid residue of the sequence
  MISC_FEATURE (6)..(6): Xaa is leucine, isoleucine, valine, phenylalanine, methionine, or an amino acid residue which is covalently linked to another amino acid residue of the sequence
  MISC_FEATURE (7)..(7): Xaa is valine, leucine, isoleucine, alanine, methionine, or an amino acid residue which is covalently linked to another amino acid residue of the sequence
  MISC_FEATURE (8)..(8): Xaa is phenylalanine, tyrosine, valine, leucine, isoleucine, methionine, or an amino acid residue which is covalently linked to another amino acid residue of the sequence
  MISC_FEATURE (9)..(9): Xaa is phenylalanine, tyrosine, valine, leucine, isoleucine, methionine, or an amino acid residue which is covalently linked to another amino acid residue of the sequence
  MISC_FEATURE (10)..(10): Xaa is alanine, valine, glycine, serine, or an amino acid residue which is covalently linked to another amino acid residue of the sequence
  MISC_FEATURE (11)..(11): Xaa is glutamic acid, aspartic acid, or an amino acid residue which is covalently linked to another amino acid residue of the sequence
  MISC_FEATURE (18)..(18): Xaa is glycine, alanine, serine, or an amino acid residue which is covalently linked to another amino acid residue of the sequence
  MISC_FEATURE (19)..(19): Xaa is alanine, valine, glycine, serine, or an amino acid residue which is covalently linked to another amino acid residue of the sequence
  MISC_FEATURE (20)..(20): Xaa is isoleucine, leucine, valine, phenylalanine, methionine, or an amino acid residue which is covalently linked to another amino acid residue of the sequence
  MISC_FEATURE (21)..(21): Xaa is isoleucine, leucine, valine, phenylalanine, methionine, or an amino acid residue which is covalently linked to another amino acid residue of the sequence
  MISC_FEATURE (22)..(22): Xaa is glycine, alanine, serine, or an amino acid residue which is covalently linked to another amino acid residue of the sequence
  MISC_FEATURE (23)..(23): Xaa is leucine, isoleucine, valine, phenylalanine, methionine, or an amino acid residue which is covalently linked to another amino acid residue of the sequence
  MISC_FEATURE (24)..(24): Xaa is methionine, valine, leucine, isoleucine, alanine, or an amino acid residue which is covalently linked to another amino acid residue of the sequence
  MISC_FEATURE (25)..(25): Xaa is valine, leucine, isoleucine, alanine, methionine, or an amino acid residue which is covalently linked to another amino acid residue of the sequence
  MISC_FEATURE (26)..(26): Xaa is glycine, alanine, serine, or an amino acid residue which is covalently linked to another amino acid residue of the sequence
  MISC_FEATURE (27)..(27): Xaa is glycine, alanine, serine, or an amino acid residue which is covalently linked to another amino acid residue of the sequence
  MISC_FEATURE (28)..(28): Xaa is valine, leucine, isoleucine, alanine, methionine, or an amino acid residue which is covalently linked to another amino acid residue of the sequence
XXXXXXXXXXXDVGSNKXXXXXXXXXXXVI

SEQ ID NO: 425 - protein, 29 aa, Artificial Sequence
  synthetic
  MISC_FEATURE (1)..(1): Xaa is histidine, tyrosine, serine, methionine, or an amino acid residue which is covalently linked to another amino acid residue of the sequence
  MISC_FEATURE (2)..(2): Xaa is histidine, tyrosine, serine, methionine, or an amino acid residue which is covalently linked to another amino acid residue of the sequence
  MISC_FEATURE (3)..(3): Xaa is glutamine, asparagine, methionine, serine, or an amino acid which is covalently linked to another amino acid residue of the sequence
  MISC_FEATURE (4)..(4): Xaa is lysine, arginine, or an amino acid residue which is covalently linked to another amino acid residue of the sequence
  MISC_FEATURE (5)..(5): Xaa is leucine, isoleucine, valine, phenylalanine, methionine, or an amino acid residue which is covalently linked to another amino acid residue of the sequence
  MISC_FEATURE (6)..(6): Xaa is valine, leucine, isoleucine, alanine, methionine, or an amino acid residue which is covalently linked to another amino acid residue of the sequence
  MISC_FEATURE (7)..(7): Xaa is phenylalanine, tyrosine, valine, leucine, isoleucine, methionine, or an amino acid residue which is covalently linked to another amino acid residue of the sequence
  MISC_FEATURE (8)..(8): Xaa is phenylalanine, tyrosine, valine, leucine, isoleucine, methionine, or an amino acid residue which is covalently linked to another amino acid residue of the sequence
  MISC_FEATURE (9)..(9): Xaa is alanine, valine, glycine, serine, or an amino acid residue which is covalently linked to another amino acid residue of the sequence
  MISC_FEATURE (10)..(10): Xaa is glutamic acid, aspartic acid, or an amino acid residue which is covalently linked to another amino acid residue of the sequence
  MISC_FEATURE (17)..(17): Xaa is glycine, alanine, serine, or an amino acid residue which is covalently linked to another amino acid residue of the sequence
  MISC_FEATURE (18)..(18): Xaa is alanine, valine, glycine, serine, or an amino acid residue which is covalently linked to another amino acid residue of the sequence
  MISC_FEATURE (19)..(19): Xaa is isoleucine, leucine, valine, phenylalanine, methionine, or an amino acid residue which is covalently linked to another amino acid residue of the sequence
  MISC_FEATURE (20)..(20): Xaa is isoleucine, leucine, valine, phenylalanine, methionine, or an amino acid residue which is covalently linked to another amino acid residue of the sequence
  MISC_FEATURE (21)..(21): Xaa is glycine, alanine, serine, or an amino acid residue which is covalently linked to another amino acid residue of the sequence
  MISC_FEATURE (22)..(22): Xaa is leucine, isoleucine, valine, phenylalanine, methionine, or an amino acid residue which is covalently linked to another amino acid residue of the sequence
  MISC_FEATURE (23)..(23): Xaa is methionine, valine, leucine, isoleucine, alanine, or an amino acid residue which is covalently linked to another amino acid residue of the sequence
  MISC_FEATURE (24)..(24): Xaa is valine, leucine, isoleucine, alanine, methionine, or an amino acid residue which is covalently linked to another amino acid residue of the sequence
  MISC_FEATURE (25)..(25): Xaa is glycine, alanine, serine, or an amino acid residue which is covalently linked to another amino acid residue of the sequence
  MISC_FEATURE (26)..(26): Xaa is glycine, alanine, serine, or an amino acid residue which is covalently linked to another amino acid residue of the sequence
XXXXXXXXXXDVGSNKXXXXXXXXXXVVI

SEQ ID NO: 426 - protein, 28 aa, Artificial Sequence
  synthetic
  MISC_FEATURE (1)..(1): Xaa is histidine, tyrosine, serine, methionine, or an amino acid residue which is covalently linked to another amino acid residue of the sequence
  MISC_FEATURE (2)..(2): Xaa is glutamine, asparagine, methionine, serine, or an amino acid which is covalently linked to another amino acid residue of the sequence
  MISC_FEATURE (3)..(3): Xaa is lysine, arginine, or an amino acid residue which is covalently linked to another amino acid residue of the sequence
  MISC_FEATURE (4)..(4): Xaa is leucine, isoleucine, valine, phenylalanine, methionine, or an amino acid residue which is covalently linked to another amino acid residue of the sequence
  MISC_FEATURE (5)..(5): Xaa is valine, leucine, isoleucine, alanine, methionine, or an amino acid residue which is covalently linked to another amino acid residue of the sequence
  MISC_FEATURE (6)..(6): Xaa is phenylalanine, tyrosine, valine, leucine, isoleucine, methionine, or an amino acid residue which is covalently linked to another amino acid residue of the sequence
  MISC_FEATURE (7)..(7): Xaa is phenylalanine, tyrosine, valine, leucine, isoleucine, methionine, or an amino acid residue which is covalently linked to another amino acid residue of the sequence
  MISC_FEATURE (8)..(8): Xaa is alanine, valine, glycine, serine, or an amino acid residue which is covalently linked to another amino acid residue of the sequence
  MISC_FEATURE (9)..(9): Xaa is glutamic acid, aspartic acid, or an amino acid residue which is covalently linked to another amino acid residue of the sequence
  MISC_FEATURE (16)..(16): Xaa is glycine, alanine, serine, or an amino acid residue which is covalently linked to another amino acid residue of the sequence
  MISC_FEATURE (17)..(17): Xaa is alanine, valine, glycine, serine, or an amino acid residue which is covalently linked to another amino acid residue of the sequence
  MISC_FEATURE (18)..(18): Xaa is isoleucine, leucine, valine, phenylalanine, methionine, or an amino acid residue which is covalently linked to another amino acid residue of the sequence
  MISC_FEATURE (19)..(19): Xaa is isoleucine, leucine, valine, phenylalanine, methionine, or an amino acid residue which is covalently linked to another amino acid residue of the sequence
  MISC_FEATURE (20)..(20): Xaa is glycine, alanine, serine, or an amino acid residue which is covalently linked to another amino acid residue of the sequence
  MISC_FEATURE (21)..(21): Xaa is leucine, isoleucine, valine, phenylalanine, methionine, or an amino acid residue which is covalently linked to another amino acid residue of the sequence
  MISC_FEATURE (22)..(22): Xaa is methionine, valine, leucine, isoleucine, alanine, or an amino acid residue which is covalently linked to another amino acid residue of the sequence
  MISC_FEATURE (23)..(23): Xaa is valine, leucine, isoleucine, alanine, methionine, or an amino acid residue which is covalently linked to another amino acid residue of the sequence
  MISC_FEATURE (24)..(24): Xaa is glycine, alanine, serine, or an amino acid residue which is covalently linked to another amino acid residue of the sequence
XXXXXXXXXDVGSNKXXXXXXXXXGVVI

SEQ ID NO: 427 - protein, 27 aa, Artificial Sequence
  synthetic
  MISC_FEATURE (1)..(1): Xaa is glutamine, asparagine, methionine, serine, or an amino acid which is covalently linked to another amino acid residue of the sequence
  MISC_FEATURE (2)..(2): Xaa is lysine, arginine, or an amino acid residue which is covalently linked to another amino acid residue of the sequence
  MISC_FEATURE (3)..(3): Xaa is leucine, isoleucine, valine, phenylalanine, methionine, or an amino acid residue which is covalently linked to another amino acid residue of the sequence
  MISC_FEATURE (4)..(4): Xaa is valine, leucine, isoleucine, alanine, methionine, or an amino acid residue which is covalently linked to another amino acid residue of the sequence
  MISC_FEATURE (5)..(5): Xaa is phenylalanine, tyrosine, valine, leucine, isoleucine, methionine, or an amino acid residue which is covalently linked to another amino acid residue of the sequence
  MISC_FEATURE (6)..(6): Xaa is phenylalanine, tyrosine, valine, leucine, isoleucine, methionine, or an amino acid residue which is covalently linked to another amino acid residue of the sequence
  MISC_FEATURE (7)..(7): Xaa is alanine, valine, glycine, serine, or an amino acid residue which is covalently linked to another amino acid residue of the sequence
  MISC_FEATURE (8)..(8): Xaa is glutamic acid, aspartic acid, or an amino acid residue which is covalently linked to another amino acid residue of the sequence
  MISC_FEATURE (15)..(15): Xaa is glycine, alanine, serine, or an amino acid residue which is covalently linked to another amino acid residue of the sequence
  MISC_FEATURE (16)..(16): Xaa is alanine, valine, glycine, serine, or an amino acid residue which is covalently linked to another amino acid residue of the sequence
  MISC_FEATURE (17)..(17): Xaa is isoleucine, leucine, valine, phenylalanine, methionine, or an amino acid residue which is covalently linked to another amino acid residue of the sequence
  MISC_FEATURE (18)..(18): Xaa is isoleucine, leucine, valine, phenylalanine, methionine, or an amino acid residue which is covalently linked to another amino acid residue of the sequence
  MISC_FEATURE (19)..(19): Xaa is glycine, alanine, serine, or an amino acid residue which is covalently linked to another amino acid residue of the sequence
  MISC_FEATURE (20)..(20): Xaa is leucine, isoleucine, valine, phenylalanine, methionine, or an amino acid residue which is covalently linked to another amino acid residue of the sequence
  MISC_FEATURE (21)..(21): Xaa is methionine, valine, leucine, isoleucine, alanine, or an amino acid residue which is covalently linked to another amino acid residue of the sequence
  MISC_FEATURE (22)..(22): Xaa is valine, leucine, isoleucine, alanine, methionine, or an amino acid residue which is covalently linked to another amino acid residue of the sequence
XXXXXXXXDVGSNKXXXXXXXXGGVVI

SEQ ID NO: 428 - protein, 26 aa, Artificial Sequence
  synthetic
  MISC_FEATURE (1)..(1): Xaa is lysine, arginine, or an amino acid residue which is covalently linked to another amino acid residue of the sequence
  MISC_FEATURE (2)..(2): Xaa is leucine, isoleucine, valine, phenylalanine, methionine, or an amino acid residue which is covalently linked to another amino acid residue of the sequence
  MISC_FEATURE (3)..(3): Xaa is valine, leucine, isoleucine, alanine, methionine, or an amino acid residue which is covalently linked to another amino acid residue of the sequence
  MISC_FEATURE (4)..(4): Xaa is phenylalanine, tyrosine, valine, leucine, isoleucine, methionine, or an amino acid residue which is covalently linked to another amino acid residue of the sequence
  MISC_FEATURE (5)..(5): Xaa is phenylalanine, tyrosine, valine, leucine, isoleucine, methionine, or an amino acid residue which is covalently linked to another amino acid residue of the sequence
  MISC_FEATURE (6)..(6): Xaa is alanine, valine, glycine, serine, or an amino acid residue which is covalently linked to another amino acid residue of the sequence
  MISC_FEATURE (7)..(7): Xaa is glutamic acid, aspartic acid, or an amino acid residue which is covalently linked to another amino acid residue of the sequence
  MISC_FEATURE (14)..(14): Xaa is glycine, alanine, serine, or an amino acid residue which is covalently linked to another amino acid residue of the sequence
  MISC_FEATURE (15)..(15): Xaa is alanine, valine, glycine, serine, or an amino acid residue which is covalently linked to another amino acid residue of the sequence
  MISC_FEATURE (16)..(16): Xaa is isoleucine, leucine, valine, phenylalanine, methionine, or an amino acid residue which is covalently linked to another amino acid residue of the sequence
  MISC_FEATURE (17)..(17): Xaa is isoleucine, leucine, valine, phenylalanine, methionine, or an amino acid residue which is covalently linked to another amino acid residue of the sequence
  MISC_FEATURE (18)..(18): Xaa is glycine, alanine, serine, or an amino acid residue which is covalently linked to another amino acid residue of the sequence
  MISC_FEATURE (19)..(19): Xaa is leucine, isoleucine, valine, phenylalanine, methionine, or an amino acid residue which is covalently linked to another amino acid residue of the sequence
  MISC_FEATURE (20)..(20): Xaa is methionine, valine, leucine, isoleucine, alanine, or an amino acid residue which is covalently linked to another amino acid residue of the sequence
XXXXXXXDVGSNKXXXXXXXVGGVVI

SEQ ID NO: 429 - protein, 25 aa, Artificial Sequence
  synthetic
  MISC_FEATURE (1)..(1): Xaa is leucine, isoleucine, valine, phenylalanine, methionine, or an amino acid residue which is covalently linked to another amino acid residue of the sequence
  MISC_FEATURE (2)..(2): Xaa is valine, leucine, isoleucine, alanine, methionine, or an amino acid residue which is covalently linked to another amino acid residue of the sequence
  MISC_FEATURE (3)..(3): Xaa is phenylalanine, tyrosine, valine, leucine, isoleucine, methionine, or an amino acid residue which is covalently linked to another amino acid residue of the sequence
  MISC_FEATURE (4)..(4): Xaa is phenylalanine, tyrosine, valine, leucine, isoleucine, methionine, or an amino acid residue which is covalently linked to another amino acid residue of the sequence
  MISC_FEATURE (5)..(5): Xaa is alanine, valine, glycine, serine, or an amino acid residue which is covalently linked to another amino acid residue of the sequence
  MISC_FEATURE (6)..(6): Xaa is glutamic acid, aspartic acid, or an amino acid residue which is covalently linked to another amino acid residue of the sequence
  MISC_FEATURE (13)..(13): Xaa is glycine, alanine, serine, or an amino acid residue which is covalently linked to another amino acid residue of the sequence
  MISC_FEATURE (14)..(14): Xaa is alanine, valine, glycine, serine, or an amino acid residue which is covalently linked to another amino acid residue of the sequence
  MISC_FEATURE (15)..(15): Xaa is isoleucine, leucine, valine, phenylalanine, methionine, or an amino acid residue which is covalently linked to another amino acid residue of the sequence
  MISC_FEATURE (16)..(16): Xaa is isoleucine, leucine, valine, phenylalanine, methionine, or an amino acid residue which is covalently linked to another amino acid residue of the sequence
  MISC_FEATURE (17)..(17): Xaa is glycine, alanine, serine, or an amino acid residue which is covalently linked to another amino acid residue of the sequence
  MISC_FEATURE (18)..(18): Xaa is leucine, isoleucine, valine, phenylalanine, methionine, or an amino acid residue which is covalently linked to another amino acid residue of the sequence
XXXXXXDVGSNKXXXXXXMVGGVVI

SEQ ID NO: 430 - protein, 24 aa, Artificial Sequence
  synthetic
  MISC_FEATURE (1)..(1): Xaa is valine, leucine, isoleucine, alanine, methionine, or an amino acid residue which is covalently linked to another amino acid residue of the sequence
  MISC_FEATURE (2)..(2): Xaa is phenylalanine, tyrosine, valine, leucine, isoleucine, methionine, or an amino acid residue which is covalently linked to another amino acid residue of the sequence
  MISC_FEATURE (3)..(3): Xaa is phenylalanine, tyrosine, valine, leucine, isoleucine, methionine, or an amino acid residue which is covalently linked to another amino acid residue of the sequence
  MISC_FEATURE (4)..(4): Xaa is alanine, valine, glycine, serine, or an amino acid residue which is covalently linked to another amino acid residue of the sequence
  MISC_FEATURE (5)..(5): Xaa is glutamic acid, aspartic acid, or an amino acid residue which is covalently linked to another amino acid residue of the sequence
  MISC_FEATURE (12)..(12): Xaa is glycine, alanine, serine, or an amino acid residue which is covalently linked to another amino acid residue of the sequence
  MISC_FEATURE (13)..(13): Xaa is alanine, valine, glycine, serine, or an amino acid residue which is covalently linked to another amino acid residue of the sequence
  MISC_FEATURE (14)..(14): Xaa is isoleucine, leucine, valine, phenylalanine, methionine, or an amino acid residue which is covalently linked to another amino acid residue of the sequence
  MISC_FEATURE (15)..(15): Xaa is isoleucine, leucine, valine, phenylalanine, methionine, or an amino acid residue which is covalently linked to another amino acid residue of the sequence
  MISC_FEATURE (16)..(16): Xaa is glycine, alanine, serine, or an amino acid residue which is covalently linked to another amino acid residue of the sequence
XXXXXDVGSNKXXXXXLMVGGVVI

SEQ ID NO: 431 - protein, 23 aa, Artificial Sequence
  synthetic
  MISC_FEATURE (1)..(1): Xaa is phenylalanine, tyrosine, valine, leucine, isoleucine, methionine, or an amino acid residue which is covalently linked to another amino acid residue of the sequence
  MISC_FEATURE (2)..(2): Xaa is phenylalanine, tyrosine, valine, leucine, isoleucine, methionine, or an amino acid residue which is covalently linked to another amino acid residue of the sequence
  MISC_FEATURE (3)..(3): Xaa is alanine, valine, glycine, serine, or an amino acid residue which is covalently linked to another amino acid residue of the sequence
  MISC_FEATURE (4)..(4): Xaa is glutamic acid, aspartic acid, or an amino acid residue which is covalently linked to another amino acid residue of the sequence
  MISC_FEATURE (11)..(11): Xaa is glycine, alanine, serine, or an amino acid residue which is covalently linked to another amino acid residue of the sequence
  MISC_FEATURE (12)..(12): Xaa is alanine, valine, glycine, serine, or an amino acid residue which is covalently linked to another amino acid residue of the sequence
  MISC_FEATURE (13)..(13): Xaa is isoleucine, leucine, valine, phenylalanine, methionine, or an amino acid residue which is covalently linked to another amino acid residue of the sequence
  MISC_FEATURE (14)..(14): Xaa is isoleucine, leucine, valine, phenylalanine, methionine, or an amino acid residue which is covalently linked to another amino acid residue of the sequence
XXXXDVGSNKXXXXGLMVGGVVI

SEQ ID NO: 432 - protein, 22 aa, Artificial Sequence
  synthetic
  MISC_FEATURE (1)..(1): Xaa is phenylalanine, tyrosine, valine, leucine, isoleucine, methionine, or an amino acid residue which is covalently linked to another amino acid residue of the sequence
  MISC_FEATURE (2)..(2): Xaa is alanine, valine, glycine, serine, or an amino acid residue which is covalently linked to another amino acid residue of the sequence
  MISC_FEATURE (3)..(3): Xaa is glutamic acid, aspartic acid, or an amino acid residue which is covalently linked to another amino acid residue of the sequence
  MISC_FEATURE (10)..(10): Xaa is glycine, alanine, serine, or an amino acid residue which is covalently linked to another amino acid residue of the sequence
  MISC_FEATURE (11)..(11): Xaa is alanine, valine, glycine, serine, or an amino acid residue which is covalently linked to another amino acid residue of the sequence
  MISC_FEATURE (12)..(12): Xaa is isoleucine, leucine, valine, phenylalanine, methionine, or an amino acid residue which is covalently linked to another amino acid residue of the sequence
XXXDVGSNKXXXIGLMVGGVVI

SEQ ID NO: 433 - protein, 21 aa, Artificial Sequence
  synthetic
  MISC_FEATURE (1)..(1): Xaa is alanine, valine, glycine, serine, or an amino acid residue which is covalently linked to another amino acid residue of the sequence
  MISC_FEATURE (2)..(2): Xaa is glutamic acid, aspartic acid, or an amino acid residue which is covalently linked to another amino acid residue of the sequence
  MISC_FEATURE (9)..(9): Xaa is glycine, alanine, serine, or an amino acid residue which is covalently linked to another amino acid residue of the sequence
  MISC_FEATURE (10)..(10): Xaa is alanine, valine, glycine, serine, or an amino acid residue which is covalently linked to another amino acid residue of the sequence
XXDVGSNKXXIIGLMVGGVVI

SEQ ID NO: 434 - protein, 20 aa, Artificial Sequence
  synthetic
  MISC_FEATURE (1)..(1): Xaa is glutamic acid, aspartic acid, or an amino acid residue which is covalently linked to another amino acid residue of the sequence
  MISC_FEATURE (8)..(8): Xaa is glycine, alanine, serine, or an amino acid residue which is covalently linked to another amino acid residue of the sequence
XDVGSNKXAIIGLMVGGVVI

SEQ ID NO: 435 - protein, 40 aa, Artificial Sequence
  synthetic
  MISC_FEATURE (12)..(12): Xaa is valine, leucine, isoleucine, alanine, methionine, or an amino acid residue which is covalently linked to another amino acid residue of the sequence
  MISC_FEATURE (13)..(13): Xaa is histidine, tyrosine, serine, methionine, or an amino acid residue which is covalently linked to another amino acid residue of the sequence
  MISC_FEATURE (14)..(14): Xaa is histidine, tyrosine, serine, methionine, or an amino acid residue which is covalently linked to another amino acid residue of the sequence
  MISC_FEATURE (15)..(15): Xaa is glutamine, asparagine, methionine, serine, or an amino acid which is covalently linked to another amino acid residue of the sequence
  MISC_FEATURE (16)..(16): Xaa is lysine, arginine, or an amino acid residue which is covalently linked to another amino acid residue of the sequence
  MISC_FEATURE (17)..(17): Xaa is leucine, isoleucine, valine, phenylalanine, methionine, or an amino acid residue which is covalently linked to another amino acid residue of the sequence
  MISC_FEATURE (18)..(18): Xaa is valine, leucine, isoleucine, alanine, methionine, or an amino acid residue which is covalently linked to another amino acid residue of the sequence
  MISC_FEATURE (19)..(19): Xaa is phenylalanine, tyrosine, valine, leucine, isoleucine, methionine, or an amino acid residue which is covalently linked to another amino acid residue of the sequence
  MISC_FEATURE (20)..(20): Xaa is phenylalanine, tyrosine, valine, leucine, isoleucine, methionine, or an amino acid residue which is covalently linked to another amino acid residue of the sequence
  MISC_FEATURE (21)..(21): Xaa is alanine, valine, glycine, serine, or an amino acid residue which is covalently linked to another amino acid residue of the sequence
  MISC_FEATURE (22)..(22): Xaa is glutamic acid, aspartic acid, or an amino acid residue which is covalently linked to another amino acid residue of the sequence
  MISC_FEATURE (29)..(29): Xaa is glycine, alanine, serine, or an amino acid residue which is covalently linked to another amino acid residue of the sequence
  MISC_FEATURE (30)..(30): Xaa is alanine, valine, glycine, serine, or an amino acid residue which is covalently linked to another amino acid residue of the sequence
  MISC_FEATURE (31)..(31): Xaa is isoleucine, leucine, valine, phenylalanine, methionine, or an amino acid residue which is covalently linked to another amino acid residue of the sequence
  MISC_FEATURE (32)..(32): Xaa is isoleucine, leucine, valine, phenylalanine, methionine, or an amino acid residue which is covalently linked to another amino acid residue of the sequence
  MISC_FEATURE (33)..(33): Xaa is glycine, alanine, serine, or an amino acid residue which is covalently linked to another amino acid residue of the sequence
  MISC_FEATURE (34)..(34): Xaa is leucine, isoleucine, valine, phenylalanine, methionine, or an amino acid residue which is covalently linked to another amino acid residue of the sequence
  MISC_FEATURE (35)..(35): Xaa is methionine, valine, leucine, isoleucine, alanine, or an amino acid residue which is covalently linked to another amino acid residue of the sequence
  MISC_FEATURE (36)..(36): Xaa is valine, leucine, isoleucine, alanine, methionine, or an amino acid residue which is covalently linked to another amino acid residue of the sequence
  MISC_FEATURE (37)..(37): Xaa is glycine, alanine, serine, or an amino acid residue which is covalently linked to another amino acid residue of the sequence
  MISC_FEATURE (38)..(38): Xaa is glycine, alanine, serine, or an amino acid residue which is covalently linked to another amino acid residue of the sequence
  MISC_FEATURE (39)..(39): Xaa is valine, leucine, isoleucine, alanine, methionine, or an amino acid residue which is covalently linked to another amino acid residue of the sequence
DAEFRHDSGYEXXXXXXXXXXXDVGSNKXXXXXXXXXXXV

SEQ ID NO: 436 - protein, 39 aa, Artificial Sequence
  synthetic
  MISC_FEATURE (11)..(11): Xaa is valine, leucine, isoleucine, alanine, methionine, or an amino acid residue which is covalently linked to another amino acid residue of the sequence
  MISC_FEATURE (12)..(12): Xaa is histidine, tyrosine, serine, methionine, or an amino acid residue which is covalently linked to another amino acid residue of the sequence
  MISC_FEATURE (13)..(13): Xaa is histidine, tyrosine, serine, methionine, or an amino acid residue which is covalently linked to another amino acid residue of the sequence
  MISC_FEATURE (14)..(14): Xaa is glutamine, asparagine, methionine, serine, or an amino acid which is covalently linked to another amino acid residue of the sequence
  MISC_FEATURE (15)..(15): Xaa is lysine, arginine, or an amino acid residue which is covalently linked to another amino acid residue of the sequence
  MISC_FEATURE (16)..(16): Xaa is leucine, isoleucine, valine, phenylalanine, methionine, or an amino acid residue which is covalently linked to another amino acid residue of the sequence
  MISC_FEATURE (17)..(17): Xaa is valine, leucine, isoleucine, alanine, methionine, or an amino acid residue which is covalently linked to another amino acid residue of the sequence
  MISC_FEATURE (18)..(18): Xaa is phenylalanine, tyrosine, valine, leucine, isoleucine, methionine, or an amino acid residue which is covalently linked to another amino acid residue of the sequence
  MISC_FEATURE (19)..(19): Xaa is phenylalanine, tyrosine, valine, leucine, isoleucine, methionine, or an amino acid residue which is covalently linked to another amino acid residue of the sequence
  MISC_FEATURE (20)..(20): Xaa is alanine, valine, glycine, serine, or an amino acid residue which is covalently linked to another amino acid residue of the sequence
  MISC_FEATURE (21)..(21): Xaa is glutamic acid, aspartic acid, or an amino acid residue which is covalently linked to another amino acid residue of the sequence
  MISC_FEATURE (28)..(28): Xaa is glycine, alanine, serine, or an amino acid residue which is covalently linked to another amino acid residue of the sequence
  MISC_FEATURE (29)..(29): Xaa is alanine, valine, glycine, serine, or an amino acid residue which is covalently linked to another amino acid residue of the sequence
  MISC_FEATURE (30)..(30): Xaa is isoleucine, leucine, valine, phenylalanine, methionine, or an amino acid residue which is covalently linked to another amino acid residue of the sequence
  MISC_FEATURE (31)..(31): Xaa is isoleucine, leucine, valine, phenylalanine, methionine, or an amino acid residue which is covalently linked to another amino acid residue of the sequence
  MISC_FEATURE (32)..(32): Xaa is glycine, alanine, serine, or an amino acid residue which is covalently linked to another amino acid residue of the sequence
  MISC_FEATURE (33)..(33): Xaa is leucine, isoleucine, valine, phenylalanine, methionine, or an amino acid residue which is covalently linked to another amino acid residue of the sequence
  MISC_FEATURE (34)..(34): Xaa is methionine, valine, leucine, isoleucine, alanine, or an amino acid residue which is covalently linked to another amino acid residue of the sequence
  MISC_FEATURE (35)..(35): Xaa is valine, leucine, isoleucine, alanine, methionine, or an amino acid residue which is covalently linked to another amino acid residue of the sequence
  MISC_FEATURE (36)..(36): Xaa is glycine, alanine, serine, or an amino acid residue which is covalently linked to another amino acid residue of the sequence
  MISC_FEATURE (37)..(37): Xaa is glycine, alanine, serine, or an amino acid residue which is covalently linked to another amino acid residue of the sequence
  MISC_FEATURE (38)..(38): Xaa is valine, leucine, isoleucine, alanine, methionine, or an amino acid residue which is covalently linked to another amino acid residue of the sequence
AEFRHDSGYEXXXXXXXXXXXDVGSNKXXXXXXXXXXXV

SEQ ID NO: 437 - protein, 38 aa, Artificial Sequence
  synthetic
  MISC_FEATURE (10)..(10): Xaa is valine, leucine, isoleucine, alanine, methionine, or an amino acid residue which is covalently linked to another amino acid residue of the sequence
  MISC_FEATURE (11)..(11): Xaa is histidine, tyrosine, serine, methionine, or an amino acid residue which is covalently linked to another amino acid residue of the sequence
  MISC_FEATURE (12)..(12): Xaa is histidine, tyrosine, serine, methionine, or an amino acid residue which is covalently linked to another amino acid residue of the sequence
  MISC_FEATURE (13)..(13): Xaa is glutamine, asparagine, methionine, serine, or an amino acid which is covalently linked to another amino acid residue of the sequence
  MISC_FEATURE (14)..(14): Xaa is lysine, arginine, or an amino acid residue which is covalently linked to another amino acid residue of the sequence
  MISC_FEATURE (15)..(15): Xaa is leucine, isoleucine, valine, phenylalanine, methionine, or an amino acid residue which is covalently linked to another amino acid residue of the sequence
  MISC_FEATURE (16)..(16): Xaa is valine, leucine, isoleucine, alanine, methionine, or an amino acid residue which is covalently linked to another amino acid residue of the sequence
  MISC_FEATURE (17)..(17): Xaa is phenylalanine, tyrosine, valine, leucine, isoleucine, methionine, or an amino acid residue which is covalently linked to another amino acid residue of the sequence
  MISC_FEATURE (18)..(18): Xaa is phenylalanine, tyrosine, valine, leucine, isoleucine, methionine, or an amino acid residue which is covalently linked to another amino acid residue of the sequence
  MISC_FEATURE (19)..(19): Xaa is alanine, valine, glycine, serine, or an amino acid residue which is covalently linked to another amino acid residue of the sequence
  MISC_FEATURE (20)..(20): Xaa is glutamic acid, aspartic acid, or an amino acid residue which is covalently linked to another amino acid residue of the sequence
  MISC_FEATURE (27)..(27): Xaa is glycine, alanine, serine, or an amino acid residue which is covalently linked to another amino acid residue of the sequence
  MISC_FEATURE (28)..(28): Xaa is alanine, valine, glycine, serine, or an amino acid residue which is covalently linked to another amino acid residue of the sequence
  MISC_FEATURE (29)..(29): Xaa is isoleucine, leucine, valine, phenylalanine, methionine, or an amino acid residue which is covalently linked to another amino acid residue of the sequence
  MISC_FEATURE (30)..(30): Xaa is isoleucine, leucine, valine, phenylalanine, methionine, or an amino acid residue which is covalently linked to another amino acid residue of the sequence
  MISC_FEATURE (31)..(31): Xaa is glycine, alanine, serine, or an amino acid residue which is covalently linked to another amino acid residue of the sequence
  MISC_FEATURE (32)..(32): Xaa is leucine, isoleucine, valine, phenylalanine, methionine, or an amino acid residue which is covalently linked to another amino acid residue of the sequence
  MISC_FEATURE (33)..(33): Xaa is methionine, valine, leucine, isoleucine, alanine, or an amino acid residue which is covalently linked to another amino acid residue of the sequence
  MISC_FEATURE (34)..(34): Xaa is valine, leucine, isoleucine, alanine, methionine, or an amino acid residue which is covalently linked to another amino acid residue of the sequence
  MISC_FEATURE (35)..(35): Xaa is glycine, alanine, serine, or an amino acid residue which is covalently linked to another amino acid residue of the sequence
  MISC_FEATURE (36)..(36): Xaa is glycine, alanine, serine, or an amino acid residue which is covalently linked to another amino acid residue of the sequence
  MISC_FEATURE (37)..(37): Xaa is valine, leucine, isoleucine, alanine, methionine, or an amino acid residue which is covalently linked to another amino acid residue of the sequence
EFRHDSGYEXXXXXXXXXXXDVGSNKXXXXXXXXXXXV

SEQ ID NO: 438 - protein, 37 aa, Artificial Sequence
  synthetic
  MISC_FEATURE (9)..(9): Xaa is valine, leucine, isoleucine, alanine, methionine, or an amino acid residue which is covalently linked to another amino acid residue of the sequence
  MISC_FEATURE (10)..(10): Xaa is histidine, tyrosine, serine, methionine, or an amino acid residue which is covalently linked to another amino acid residue of the sequence
  MISC_FEATURE (11)..(11): Xaa is histidine, tyrosine, serine, methionine, or an amino acid residue which is covalently linked to another amino acid residue of the sequence
  MISC_FEATURE (12)..(12): Xaa is glutamine, asparagine, methionine, serine, or an amino acid which is covalently linked to another amino acid residue of the sequence
  MISC_FEATURE (13)..(13): Xaa is lysine, arginine, or an amino acid residue which is covalently linked to another amino acid residue of the sequence
  MISC_FEATURE (14)..(14): Xaa is leucine, isoleucine, valine, phenylalanine, methionine, or an amino acid residue which is covalently linked to another amino acid residue of the sequence
  MISC_FEATURE (15)..(15): Xaa is valine, leucine, isoleucine, alanine, methionine, or an amino acid residue which is covalently linked to another amino acid residue of the sequence
  MISC_FEATURE (16)..(16): Xaa is phenylalanine, tyrosine, valine, leucine, isoleucine, methionine, or an amino acid residue which is covalently linked to another amino acid residue of the sequence
  MISC_FEATURE (17)..(17): Xaa is phenylalanine, tyrosine, valine, leucine, isoleucine, methionine, or an amino acid residue which is covalently linked to another amino acid residue of the sequence
  MISC_FEATURE (18)..(18): Xaa is alanine, valine, glycine, serine, or an amino acid residue which is covalently linked to another amino acid residue of the sequence
  MISC_FEATURE (19)..(19): Xaa is glutamic acid, aspartic acid, or an amino acid residue which is covalently linked to another amino acid residue of the sequence
  MISC_FEATURE (26)..(26): Xaa is glycine, alanine, serine, or an amino acid residue which is covalently linked to another amino acid residue of the sequence
  MISC_FEATURE (27)..(27): Xaa is alanine, valine, glycine, serine, or an amino acid residue which is covalently linked to another amino acid residue of the sequence
  MISC_FEATURE (28)..(28): Xaa is isoleucine, leucine, valine, phenylalanine, methionine, or an amino acid residue which is covalently linked to another amino acid residue of the sequence
  MISC_FEATURE (29)..(29): Xaa is isoleucine, leucine, valine, phenylalanine, methionine, or an amino acid residue which is covalently linked to another amino acid residue of the sequence
  MISC_FEATURE (30)..(30): Xaa is glycine, alanine, serine, or an amino acid residue which is covalently linked to another amino acid residue of the sequence
  MISC_FEATURE (31)..(31): Xaa is leucine, isoleucine, valine, phenylalanine, methionine, or an amino acid residue which is covalently linked to another amino acid residue of the sequence
  MISC_FEATURE (32)..(32): Xaa is methionine, valine, leucine, isoleucine, alanine, or an amino acid residue which is covalently linked to another amino acid residue of the sequence
  MISC_FEATURE (33)..(33): Xaa is valine, leucine, isoleucine, alanine, methionine, or an amino acid residue which is covalently linked to another amino acid residue of the sequence
  MISC_FEATURE (34)..(34): Xaa is glycine, alanine, serine, or an amino acid residue which is covalently linked to another amino acid residue of the sequence
  MISC_FEATURE (35)..(35): Xaa is glycine, alanine, serine, or an amino acid residue which is covalently linked to another amino acid residue of the sequence
  MISC_FEATURE (36)..(36): Xaa is valine, leucine, isoleucine, alanine, methionine, or an amino acid residue which is covalently linked to another amino acid residue of the sequence
FRHDSGYEXXXXXXXXXXXDVGSNKXXXXXXXXXXXV

SEQ ID NO: 439 - protein, 36 aa, Artificial Sequence
  synthetic
  MISC_FEATURE (8)..(8): Xaa is valine, leucine, isoleucine, alanine, methionine, or an amino acid residue which is covalently linked to another amino acid residue of the sequence
  MISC_FEATURE (9)..(9): Xaa is histidine, tyrosine, serine, methionine, or an amino acid residue which is covalently linked to another amino acid residue of the sequence
  MISC_FEATURE (10)..(10): Xaa is histidine, tyrosine, serine, methionine, or an amino acid residue which is covalently linked to another amino acid residue of the sequence
  MISC_FEATURE (11)..(11): Xaa is glutamine, asparagine, methionine, serine, or an amino acid which is covalently linked to another amino acid residue of the sequence
  MISC_FEATURE (12)..(12): Xaa is lysine, arginine, or an amino acid residue which is covalently linked to another amino acid residue of the sequence
  MISC_FEATURE (13)..(13): Xaa is leucine, isoleucine, valine, phenylalanine, methionine, or an amino acid residue which is covalently linked to another amino acid residue of the sequence
  MISC_FEATURE (14)..(14): Xaa is valine, leucine, isoleucine, alanine, methionine, or an amino acid residue which is covalently linked to another amino acid residue of the sequence
  MISC_FEATURE (15)..(15): Xaa is phenylalanine, tyrosine, valine, leucine, isoleucine, methionine, or an amino acid residue which is covalently linked to another amino acid residue of the sequence
  MISC_FEATURE (16)..(16): Xaa is phenylalanine, tyrosine, valine, leucine, isoleucine, methionine, or an amino acid residue which is covalently linked to another amino acid residue of the sequence
  MISC_FEATURE (17)..(17): Xaa is alanine, valine, glycine, serine, or an amino acid residue which is covalently linked to another amino acid residue of the sequence
  MISC_FEATURE (18)..(18): Xaa is glutamic acid, aspartic acid, or an amino acid residue which is covalently linked to another amino acid residue of the sequence
  MISC_FEATURE (25)..(25): Xaa is glycine, alanine, serine, or an amino acid residue which is covalently linked to another amino acid residue of the sequence
  MISC_FEATURE (26)..(26): Xaa is alanine, valine, glycine, serine, or an amino acid residue which is covalently linked to another amino acid residue of the sequence
  MISC_FEATURE (27)..(27): Xaa is isoleucine, leucine, valine, phenylalanine, methionine, or an amino acid residue which is covalently linked to another amino acid residue of the sequence
  MISC_FEATURE (28)..(28): Xaa is isoleucine, leucine, valine, phenylalanine, methionine, or an amino acid residue which is covalently linked to another amino acid residue of the sequence
  MISC_FEATURE (29)..(29): Xaa is glycine, alanine, serine, or an amino acid residue which is covalently linked to another amino acid residue of the sequence
  MISC_FEATURE (30)..(30): Xaa is leucine, isoleucine, valine, phenylalanine, methionine, or an amino acid residue which is covalently linked to another amino acid residue of the sequence
  MISC_FEATURE (31)..(31): Xaa is methionine, valine, leucine, isoleucine, alanine, or an amino acid residue which is covalently linked to another amino acid residue of the sequence
  MISC_FEATURE (32)..(32): Xaa is valine, leucine, isoleucine, alanine, methionine, or an amino acid residue which is covalently linked to another amino acid residue of the sequence
  MISC_FEATURE (33)..(33): Xaa is glycine, alanine, serine, or an amino acid residue which is covalently linked to another amino acid residue of the sequence
  MISC_FEATURE (34)..(34): Xaa is glycine, alanine, serine, or an amino acid residue which is covalently linked to another amino acid residue of the sequence
  MISC_FEATURE (35)..(35): Xaa is valine, leucine, isoleucine, alanine, methionine, or an amino acid residue which is covalently linked to another amino acid residue of the sequence
RHDSGYEXXXXXXXXXXXDVGSNKXXXXXXXXXXXV

SEQ ID NO: 440 - protein, 35 aa, Artificial Sequence
  synthetic
  MISC_FEATURE (7)..(7): Xaa is valine, leucine, isoleucine, alanine, methionine, or an amino acid residue which is covalently linked to another amino acid residue of the sequence
  MISC_FEATURE (8)..(8): Xaa is histidine, tyrosine, serine, methionine, or an amino acid residue which is covalently linked to another amino acid residue of the sequence
  MISC_FEATURE (9)..(9): Xaa is histidine, tyrosine, serine, methionine, or an amino acid residue which is covalently linked to another amino acid residue of the sequence
  MISC_FEATURE (10)..(10): Xaa is glutamine, asparagine, methionine, serine, or an amino acid which is covalently linked to another amino acid residue of the sequence
  MISC_FEATURE (11)..(11): Xaa is lysine, arginine, or an amino acid residue which is covalently linked to another amino acid residue of the sequence
  MISC_FEATURE (12)..(12): Xaa is leucine, isoleucine, valine, phenylalanine, methionine, or an amino acid residue which is covalently linked to another amino acid residue of the sequence
  MISC_FEATURE (13)..(13): Xaa is valine, leucine, isoleucine, alanine, methionine, or an amino acid residue which is covalently linked to another amino acid residue of the sequence
  MISC_FEATURE (14)..(14): Xaa is phenylalanine, tyrosine, valine, leucine, isoleucine, methionine, or an amino acid residue which is covalently linked to another amino acid residue of the sequence
  MISC_FEATURE (15)..(15): Xaa is phenylalanine, tyrosine, valine, leucine, isoleucine, methionine, or an amino acid residue which is covalently linked to another amino acid residue of the sequence
  MISC_FEATURE (16)..(16): Xaa is alanine, valine, glycine, serine, or an amino acid residue which is covalently linked to another amino acid residue of the sequence
  MISC_FEATURE (17)..(17): Xaa is glutamic acid, aspartic acid, or an amino acid residue which is covalently linked to another amino acid residue of the sequence
  MISC_FEATURE (24)..(24): Xaa is glycine, alanine, serine, or an amino acid residue which is covalently linked to another amino acid residue of the sequence
  MISC_FEATURE (25)..(25): Xaa is alanine, valine, glycine, serine, or an amino acid residue which is covalently linked to another amino acid residue of the sequence
  MISC_FEATURE (26)..(26): Xaa is isoleucine, leucine, valine, phenylalanine, methionine, or an amino acid residue which is covalently linked to another amino acid residue of the sequence
  MISC_FEATURE (27)..(27): Xaa is isoleucine, leucine, valine, phenylalanine, methionine, or an amino acid residue which is covalently linked to another amino acid residue of the sequence
  MISC_FEATURE (28)..(28): Xaa is glycine, alanine, serine, or an amino acid residue which is covalently linked to another amino acid residue of the sequence
  MISC_FEATURE (29)..(29): Xaa is leucine, isoleucine, valine, phenylalanine, methionine, or an amino acid residue which is covalently linked to another amino acid residue of the sequence
  MISC_FEATURE (30)..(30): Xaa is methionine, valine, leucine, isoleucine, alanine, or an amino acid residue which is covalently linked to another amino acid residue of the sequence
  MISC_FEATURE (31)..(31): Xaa is valine, leucine, isoleucine, alanine, methionine, or an amino acid residue which is covalently linked to another amino acid residue of the sequence
  MISC_FEATURE (32)..(32): Xaa is glycine, alanine, serine, or an amino acid residue which is covalently linked to another amino acid residue of the sequence
  MISC_FEATURE (33)..(33): Xaa is glycine, alanine, serine, or an amino acid residue which is covalently linked to another amino acid residue of the sequence
  MISC_FEATURE (34)..(34): Xaa is valine, leucine, isoleucine, alanine, methionine, or an amino acid residue which is covalently linked to another amino acid residue of the sequence
HDSGYEXXXXXXXXXXXDVGSNKXXXXXXXXXXXV

SEQ ID NO: 441 - protein, 34 aa, Artificial Sequence
  synthetic
  MISC_FEATURE (6)..(6): Xaa is valine, leucine, isoleucine, alanine, methionine, or an amino acid residue which is covalently linked to another amino acid residue of the sequence
  MISC_FEATURE (7)..(7): Xaa is histidine, tyrosine, serine, methionine, or an amino acid residue which is covalently linked to another amino acid residue of the sequence
  MISC_FEATURE (8)..(8): Xaa is histidine, tyrosine, serine, methionine, or an amino acid residue which is covalently linked to another amino acid residue of the sequence
  MISC_FEATURE (9)..(9): Xaa is glutamine, asparagine, methionine, serine, or an amino acid which is covalently linked to another amino acid residue of the sequence
  MISC_FEATURE (10)..(10): Xaa is lysine, arginine, or an amino acid residue which is covalently linked to another amino acid residue of the sequence
  MISC_FEATURE (11)..(11): Xaa is leucine, isoleucine, valine, phenylalanine, methionine, or an amino acid residue which is covalently linked to another amino acid residue of the sequence
  MISC_FEATURE (12)..(12): Xaa is valine, leucine, isoleucine, alanine, methionine, or an amino acid residue which is covalently linked to another amino acid residue of the sequence
  MISC_FEATURE (13)..(13): Xaa is phenylalanine, tyrosine, valine, leucine, isoleucine, methionine, or an amino acid residue which is covalently linked to another amino acid residue of the sequence
  MISC_FEATURE (14)..(14): Xaa is phenylalanine, tyrosine, valine, leucine, isoleucine, methionine, or an amino acid residue which is covalently linked to another amino acid residue of the sequence
  MISC_FEATURE (15)..(15): Xaa is alanine, valine, glycine, serine, or an amino acid residue which is covalently linked to another amino acid residue of the sequence
  MISC_FEATURE (16)..(16): Xaa is glutamic acid, aspartic acid, or an amino acid residue which is covalently linked to another amino acid residue of the sequence
  MISC_FEATURE (23)..(23): Xaa is glycine, alanine, serine, or an amino acid residue which is covalently linked to another amino acid residue of the sequence
  MISC_FEATURE (24)..(24): Xaa is alanine, valine, glycine, serine, or an amino acid residue which is covalently linked to another amino acid residue of the sequence
  MISC_FEATURE (25)..(25): Xaa is isoleucine, leucine, valine, phenylalanine, methionine, or an amino acid residue which is covalently linked to another amino acid residue of the sequence
  MISC_FEATURE (26)..(26): Xaa is isoleucine, leucine, valine, phenylalanine, methionine, or an amino acid residue which is covalently linked to another amino acid residue of the sequence
  MISC_FEATURE (27)..(27): Xaa is glycine, alanine, serine, or an amino acid residue which is covalently linked to another amino acid residue of the sequence
  MISC_FEATURE (28)..(28): Xaa is leucine, isoleucine, valine, phenylalanine, methionine, or an amino acid residue which is covalently linked to another amino acid residue of the sequence
  MISC_FEATURE (29)..(29): Xaa is methionine, valine, leucine, isoleucine, alanine, or an amino acid residue which is covalently linked to another amino acid residue of the sequence
  MISC_FEATURE (30)..(30): Xaa is valine, leucine, isoleucine, alanine, methionine, or an amino acid residue which is covalently linked to another amino acid residue of the sequence
  MISC_FEATURE (31)..(31): Xaa is glycine, alanine, serine, or an amino acid residue which is covalently linked to another amino acid residue of the sequence
  MISC_FEATURE (32)..(32): Xaa is glycine, alanine, serine, or an amino acid residue which is covalently linked to another amino acid residue of the sequence
  MISC_FEATURE (33)..(33): Xaa is valine, leucine, isoleucine, alanine, methionine, or an amino acid residue which is covalently linked to another amino acid residue of the sequence
DSGYEXXXXXXXXXXXDVGSNKXXXXXXXXXXXV

SEQ ID NO: 442 - protein, 33 aa, Artificial Sequence
  synthetic
  MISC_FEATURE (5)..(5): Xaa is valine, leucine, isoleucine, alanine, methionine, or an amino acid residue which is covalently linked to another amino acid residue of the sequence
  MISC_FEATURE (6)..(6): Xaa is histidine, tyrosine, serine, methionine, or an amino acid residue which is covalently linked to another amino acid residue of the sequence
  MISC_FEATURE (7)..(7): Xaa is histidine, tyrosine, serine, methionine, or an amino acid residue which is covalently linked to another amino acid residue of the sequence
  MISC_FEATURE (8)..(8): Xaa is glutamine, asparagine, methionine, serine, or an amino acid which is covalently linked to another amino acid residue of the sequence
  MISC_FEATURE (9)..(9): Xaa is lysine, arginine, or an amino acid residue which is covalently linked to another amino acid residue of the sequence
  MISC_FEATURE (10)..(10): Xaa is leucine, isoleucine, valine, phenylalanine, methionine, or an amino acid residue which is covalently linked to another amino acid residue of the sequence
  MISC_FEATURE (11)..(11): Xaa is valine, leucine, isoleucine, alanine, methionine, or an amino acid residue which is covalently linked to another amino acid residue of the sequence
  MISC_FEATURE (12)..(12): Xaa is phenylalanine, tyrosine, valine, leucine, isoleucine, methionine, or an amino acid residue which is covalently linked to another amino acid residue of the sequence
  MISC_FEATURE (13)..(13): Xaa is phenylalanine, tyrosine, valine, leucine, isoleucine, methionine, or an amino acid residue which is covalently linked to another amino acid residue of the sequence
  MISC_FEATURE (14)..(14): Xaa is alanine, valine, glycine, serine, or an amino acid residue which is covalently linked to another amino acid residue of the sequence
  MISC_FEATURE (15)..(15): Xaa is glutamic acid, aspartic acid, or an amino acid residue which is covalently linked to another amino acid residue of the sequence
  MISC_FEATURE (22)..(22): Xaa is glycine, alanine, serine, or an amino acid residue which is covalently linked to another amino acid residue of the sequence
  MISC_FEATURE (23)..(23): Xaa is alanine, valine, glycine, serine, or an amino acid residue which is covalently linked to another amino acid residue of the sequence
  MISC_FEATURE (24)..(24): Xaa is isoleucine, leucine, valine, phenylalanine, methionine, or an amino acid residue which is covalently linked to another amino acid residue of the sequence
  MISC_FEATURE (25)..(25): Xaa is isoleucine, leucine, valine, phenylalanine, methionine, or an amino acid residue which is covalently linked to another amino acid residue of the sequence
  MISC_FEATURE (26)..(26): Xaa is glycine, alanine, serine, or an amino acid residue which is covalently linked to another amino acid residue of the sequence
  MISC_FEATURE (27)..(27): Xaa is leucine, isoleucine, valine, phenylalanine, methionine, or an amino acid residue which is covalently linked to another amino acid residue of the sequence
  MISC_FEATURE (28)..(28): Xaa is methionine, valine, leucine, isoleucine, alanine, or an amino acid residue which is covalently linked to another amino acid residue of the sequence
  MISC_FEATURE (29)..(29): Xaa is valine, leucine, isoleucine, alanine, methionine, or an amino acid residue which is covalently linked to another amino acid residue of the sequence
  MISC_FEATURE (30)..(30): Xaa is glycine, alanine, serine, or an amino acid residue which is covalently linked to another amino acid residue of the sequence
  MISC_FEATURE (31)..(31): Xaa is glycine, alanine, serine, or an amino acid residue which is covalently linked to another amino acid residue of the sequence
  MISC_FEATURE (32)..(32): Xaa is valine, leucine, isoleucine, alanine, methionine, or an amino acid residue which is covalently linked to another amino acid residue of the sequence
SGYEXXXXXXXXXXXDVGSNKXXXXXXXXXXXV

SEQ ID NO: 443 - protein, 32 aa, Artificial Sequence
  synthetic
  MISC_FEATURE (4)..(4): Xaa is valine, leucine, isoleucine, alanine, methionine, or an amino acid residue which is covalently linked to another amino acid residue of the sequence
  MISC_FEATURE (5)..(5): Xaa is histidine, tyrosine, serine, methionine, or an amino acid residue which is covalently linked to another amino acid residue of the sequence
  MISC_FEATURE (6)..(6): Xaa is histidine, tyrosine, serine, methionine, or an amino acid residue which is covalently linked to another amino acid residue of the sequence
  MISC_FEATURE (7)..(7): Xaa is glutamine, asparagine, methionine, serine, or an amino acid which is covalently linked to another amino acid residue of the sequence
  MISC_FEATURE (8)..(8): Xaa is lysine, arginine, or an amino acid residue which is covalently linked to another amino acid residue of the sequence
  MISC_FEATURE (9)..(9): Xaa is leucine, isoleucine, valine, phenylalanine, methionine, or an amino acid residue which is covalently linked to another amino acid residue of the sequence
  MISC_FEATURE (10)..(10): Xaa is valine, leucine, isoleucine, alanine, methionine, or an amino acid residue which is covalently linked to another amino acid residue of the sequence
  MISC_FEATURE (11)..(11): Xaa is phenylalanine, tyrosine, valine, leucine, isoleucine, methionine, or an amino acid residue which is covalently linked to another amino acid residue of the sequence
  MISC_FEATURE (12)..(12): Xaa is phenylalanine, tyrosine, valine, leucine, isoleucine, methionine, or an amino acid residue which is covalently linked to another amino acid residue of the sequence
  MISC_FEATURE (13)..(13): Xaa is alanine, valine, glycine, serine, or an amino acid residue which is covalently linked to another amino acid residue of the sequence
  MISC_FEATURE (14)..(14): Xaa is glutamic acid, aspartic acid, or an amino acid residue which is covalently linked to another amino acid residue of the sequence
  MISC_FEATURE (21)..(21): Xaa is glycine, alanine, serine, or an amino acid residue which is covalently linked to another amino acid residue of the sequence
  MISC_FEATURE (22)..(22): Xaa is alanine, valine, glycine, serine, or an amino acid residue which is covalently linked to another amino acid residue of the sequence
  MISC_FEATURE (23)..(23): Xaa is isoleucine, leucine, valine, phenylalanine, methionine, or an amino acid residue which is covalently linked to another amino acid residue of the sequence
  MISC_FEATURE (24)..(24): Xaa is isoleucine, leucine, valine, phenylalanine, methionine, or an amino acid residue which is covalently linked to another amino acid residue of the sequence
  MISC_FEATURE (25)..(25): Xaa is glycine, alanine, serine, or an amino acid residue which is covalently linked to another amino acid residue of the sequence
  MISC_FEATURE (26)..(26): Xaa is leucine, isoleucine, valine, phenylalanine, methionine, or an amino acid residue which is covalently linked to another amino acid residue of the sequence
  MISC_FEATURE (27)..(27): Xaa is methionine, valine, leucine, isoleucine, alanine, or an amino acid residue which is covalently linked to another amino acid residue of the sequence
  MISC_FEATURE (28)..(28): Xaa is valine, leucine, isoleucine, alanine, methionine, or an amino acid residue which is covalently linked to another amino acid residue of the sequence
  MISC_FEATURE (29)..(29): Xaa is glycine, alanine, serine, or an amino acid residue which is covalently linked to another amino acid residue of the sequence
  MISC_FEATURE (30)..(30): Xaa is glycine, alanine, serine, or an amino acid residue which is covalently linked to another amino acid residue of the sequence
  MISC_FEATURE (31)..(31): Xaa is valine, leucine, isoleucine, alanine, methionine, or an amino acid residue which is covalently linked to another amino acid residue of the sequence
GYEXXXXXXXXXXXDVGSNKXXXXXXXXXXXV

SEQ ID NO: 444 - protein, 31 aa, Artificial Sequence
  synthetic
  MISC_FEATURE (3)..(3): Xaa is valine, leucine, isoleucine, alanine, methionine, or an amino acid residue which is covalently linked to another amino acid residue of the sequence
  MISC_FEATURE (4)..(4): Xaa is histidine, tyrosine, serine, methionine, or an amino acid residue which is covalently linked to another amino acid residue of the sequence
  MISC_FEATURE (5)..(5): Xaa is histidine, tyrosine, serine, methionine, or an amino acid residue which is covalently linked to another amino acid residue of the sequence
  MISC_FEATURE (6)..(6): Xaa is glutamine, asparagine, methionine, serine, or an amino acid which is covalently linked to another amino acid residue of the sequence
  MISC_FEATURE (7)..(7): Xaa is lysine, arginine, or an amino acid residue which is covalently linked to another amino acid residue of the sequence
  MISC_FEATURE (8)..(8): Xaa is leucine, isoleucine, valine, phenylalanine, methionine, or an amino acid residue which is covalently linked to another amino acid residue of the sequence
  MISC_FEATURE (9)..(9): Xaa is valine, leucine, isoleucine, alanine, methionine, or an amino acid residue which is covalently linked to another amino acid residue of the sequence
  MISC_FEATURE (10)..(10): Xaa is phenylalanine, tyrosine, valine, leucine, isoleucine, methionine, or an amino acid residue which is covalently linked to another amino acid residue of the sequence
  MISC_FEATURE (11)..(11): Xaa is phenylalanine, tyrosine, valine, leucine, isoleucine, methionine, or an amino acid residue which is covalently linked to another amino acid residue of the sequence
  MISC_FEATURE (12)..(12): Xaa is alanine, valine, glycine, serine, or an amino acid residue which is covalently linked to another amino acid residue of the sequence
  MISC_FEATURE (13)..(13): Xaa is glutamic acid, aspartic acid, or an amino acid residue which is covalently linked to another amino acid residue of the sequence
  MISC_FEATURE (20)..(20): Xaa is glycine, alanine, serine, or an amino acid residue which is covalently linked to another amino acid residue of the sequence
  MISC_FEATURE (21)..(21): Xaa is alanine, valine, glycine, serine, or an amino acid residue which is covalently linked to another amino acid residue of the sequence
  MISC_FEATURE (22)..(22): Xaa is isoleucine, leucine, valine, phenylalanine, methionine, or an amino acid residue which is covalently linked to another amino acid residue of the sequence
  MISC_FEATURE (23)..(23): Xaa is isoleucine, leucine, valine, phenylalanine, methionine, or an amino acid residue which is covalently linked to another amino acid residue of the sequence
  MISC_FEATURE (24)..(24): Xaa is glycine, alanine, serine, or an amino acid residue which is covalently linked to another amino acid residue of the sequence
  MISC_FEATURE (25)..(25): Xaa is leucine, isoleucine, valine, phenylalanine, methionine, or an amino acid residue which is covalently linked to another amino acid residue of the sequence
  MISC_FEATURE (26)..(26): Xaa is methionine, valine, leucine, isoleucine, alanine, or an amino acid residue which is covalently linked to another amino acid residue of the sequence
  MISC_FEATURE (27)..(27): Xaa is valine, leucine, isoleucine, alanine, methionine, or an amino acid residue which is covalently linked to another amino acid residue of the sequence
  MISC_FEATURE (28)..(28): Xaa is glycine, alanine, serine, or an amino acid residue which is covalently linked to another amino acid residue of the sequence
  MISC_FEATURE (29)..(29): Xaa is glycine, alanine, serine, or an amino acid residue which is covalently linked to another amino acid residue of the sequence
  MISC_FEATURE (30)..(30): Xaa is valine, leucine, isoleucine, alanine, methionine, or an amino acid residue which is covalently linked to another amino acid residue of the sequence
YEXXXXXXXXXXXDVGSNKXXXXXXXXXXXV

SEQ ID NO: 445 - protein, 30 aa, Artificial Sequence
  synthetic
  MISC_FEATURE (2)..(2): Xaa is valine, leucine, isoleucine, alanine, methionine, or an amino acid residue which is covalently linked to another amino acid residue of the sequence
  MISC_FEATURE (3)..(3): Xaa is histidine, tyrosine, serine, methionine, or an amino acid residue which is covalently linked to another amino acid residue of the sequence
  MISC_FEATURE (4)..(4): Xaa is histidine, tyrosine, serine, methionine, or an amino acid residue which is covalently linked to another amino acid residue of the sequence
  MISC_FEATURE (5)..(5): Xaa is glutamine, asparagine, methionine, serine, or an amino acid which is covalently linked to another amino acid residue of the sequence
  MISC_FEATURE (6)..(6): Xaa is lysine, arginine, or an amino acid residue which is covalently linked to another amino acid residue of the sequence
  MISC_FEATURE (7)..(7): Xaa is leucine, isoleucine, valine, phenylalanine, methionine, or an amino acid residue which is covalently linked to another amino acid residue of the sequence
  MISC_FEATURE (8)..(8): Xaa is valine, leucine, isoleucine, alanine, methionine, or an amino acid residue which is covalently linked to another amino acid residue of the sequence
  MISC_FEATURE (9)..(9): Xaa is phenylalanine, tyrosine, valine, leucine, isoleucine, methionine, or an amino acid residue which is covalently linked to another amino acid residue of the sequence
  MISC_FEATURE (10)..(10): Xaa is phenylalanine, tyrosine, valine, leucine, isoleucine, methionine, or an amino acid residue which is covalently linked to another amino acid residue of the sequence
  MISC_FEATURE (11)..(11): Xaa is alanine, valine, glycine, serine, or an amino acid residue which is covalently linked to another amino acid residue of the sequence
  MISC_FEATURE (12)..(12): Xaa is glutamic acid, aspartic acid, or an amino acid residue which is covalently linked to another amino acid residue of the sequence
  MISC_FEATURE (19)..(19): Xaa is glycine, alanine, serine, or an amino acid residue which is covalently linked to another amino acid residue of the sequence
  MISC_FEATURE (20)..(20): Xaa is alanine, valine, glycine, serine, or an amino acid residue which is covalently linked to another amino acid residue of the sequence
  MISC_FEATURE (21)..(21): Xaa is isoleucine, leucine, valine, phenylalanine, methionine, or an amino acid residue which is covalently linked to another amino acid residue of the sequence
  MISC_FEATURE (22)..(22): Xaa is isoleucine, leucine, valine, phenylalanine, methionine, or an amino acid residue which is covalently linked to another amino acid residue of the sequence
  MISC_FEATURE (23)..(23): Xaa is glycine, alanine, serine, or an amino acid residue which is covalently linked to another amino acid residue of the sequence
  MISC_FEATURE (24)..(24): Xaa is leucine, isoleucine, valine, phenylalanine, methionine, or an amino acid residue which is covalently linked to another amino acid residue of the sequence
  MISC_FEATURE (25)..(25): Xaa is methionine, valine, leucine, isoleucine, alanine, or an amino acid residue which is covalently linked to another amino acid residue of the sequence
  MISC_FEATURE (26)..(26): Xaa is valine, leucine, isoleucine, alanine, methionine, or an amino acid residue which is covalently linked to another amino acid residue of the sequence
  MISC_FEATURE (27)..(27): Xaa is glycine, alanine, serine, or an amino acid residue which is covalently linked to another amino acid residue of the sequence
  MISC_FEATURE (28)..(28): Xaa is glycine, alanine, serine, or an amino acid residue which is covalently linked to another amino acid residue of the sequence
  MISC_FEATURE (29)..(29): Xaa is valine, leucine, isoleucine, alanine, methionine, or an amino acid residue which is covalently linked to another amino acid residue of the sequence
EXXXXXXXXXXXDVGSNKXXXXXXXXXXXV

SEQ ID NO: 446 - protein, 29 aa, Artificial Sequence
  synthetic
  MISC_FEATURE (1)..(1): Xaa is valine, leucine, isoleucine, alanine, methionine, or an amino acid residue which is covalently linked to another amino acid residue of the sequence
  MISC_FEATURE (2)..(2): Xaa is histidine, tyrosine, serine, methionine, or an amino acid residue which is covalently linked to another amino acid residue of the sequence
  MISC_FEATURE (3)..(3): Xaa is histidine, tyrosine, serine, methionine, or an amino acid residue which is covalently linked to another amino acid residue of the sequence
  MISC_FEATURE (4)..(4): Xaa is glutamine, asparagine, methionine, serine, or an amino acid which is covalently linked to another amino acid residue of the sequence
  MISC_FEATURE (5)..(5): Xaa is lysine, arginine, or an amino acid residue which is covalently linked to another amino acid residue of the sequence
  MISC_FEATURE (6)..(6): Xaa is leucine, isoleucine, valine, phenylalanine, methionine, or an amino acid residue which is covalently linked to another amino acid residue of the sequence
  MISC_FEATURE (7)..(7): Xaa is valine, leucine, isoleucine, alanine, methionine, or an amino acid residue which is covalently linked to another amino acid residue of the sequence
  MISC_FEATURE (8)..(8): Xaa is phenylalanine, tyrosine, valine, leucine, isoleucine, methionine, or an amino acid residue which is covalently linked to another amino acid residue of the sequence
  MISC_FEATURE (9)..(9): Xaa is phenylalanine, tyrosine, valine, leucine, isoleucine, methionine, or an amino acid residue which is covalently linked to another amino acid residue of the sequence
  MISC_FEATURE (10)..(10): Xaa is alanine, valine, glycine, serine, or an amino acid residue which is covalently linked to another amino acid residue of the sequence
  MISC_FEATURE (11)..(11): Xaa is glutamic acid, aspartic acid, or an amino acid residue which is covalently linked to another amino acid residue of the sequence
  MISC_FEATURE (18)..(18): Xaa is glycine, alanine, serine, or an amino acid residue which is covalently linked to another amino acid residue of the sequence
  MISC_FEATURE (19)..(19): Xaa is alanine, valine, glycine, serine, or an amino acid residue which is covalently linked to another amino acid residue of the sequence
  MISC_FEATURE (20)..(20): Xaa is isoleucine, leucine, valine, phenylalanine, methionine, or an amino acid residue which is covalently linked to another amino acid residue of the sequence
  MISC_FEATURE (21)..(21): Xaa is isoleucine, leucine, valine, phenylalanine, methionine, or an amino acid residue which is covalently linked to another amino acid residue of the sequence
  MISC_FEATURE (22)..(22): Xaa is glycine, alanine, serine, or an amino acid residue which is covalently linked to another amino acid residue of the sequence
  MISC_FEATURE (23)..(23): Xaa is leucine, isoleucine, valine, phenylalanine, methionine, or an amino acid residue which is covalently linked to another amino acid residue of the sequence
  MISC_FEATURE (24)..(24): Xaa is methionine, valine, leucine, isoleucine, alanine, or an amino acid residue which is covalently linked to another amino acid residue of the sequence
  MISC_FEATURE (25)..(25): Xaa is valine, leucine, isoleucine, alanine, methionine, or an amino acid residue which is covalently linked to another amino acid residue of the sequence
  MISC_FEATURE (26)..(26): Xaa is glycine, alanine, serine, or an amino acid residue which is covalently linked to another amino acid residue of the sequence
  MISC_FEATURE (27)..(27): Xaa is glycine, alanine, serine, or an amino acid residue which is covalently linked to another amino acid residue of the sequence
  MISC_FEATURE (28)..(28): Xaa is valine, leucine, isoleucine, alanine, methionine, or an amino acid residue which is covalently linked to another amino acid residue of the sequence
XXXXXXXXXXXDVGSNKXXXXXXXXXXXV

SEQ ID NO: 447 - protein, 28 aa, Artificial Sequence
  synthetic
  MISC_FEATURE (1)..(1): Xaa is histidine, tyrosine, serine, methionine, or an amino acid residue which is covalently linked to another amino acid residue of the sequence
  MISC_FEATURE (2)..(2): Xaa is histidine, tyrosine, serine, methionine, or an amino acid residue which is covalently linked to another amino acid residue of the sequence
  MISC_FEATURE (3)..(3): Xaa is glutamine, asparagine, methionine, serine, or an amino acid which is covalently linked to another amino acid residue of the sequence
  MISC_FEATURE (4)..(4): Xaa is lysine, arginine, or an amino acid residue which is covalently linked to another amino acid residue of the sequence
  MISC_FEATURE (5)..(5): Xaa is leucine, isoleucine, valine, phenylalanine, methionine, or an amino acid residue which is covalently linked to another amino acid residue of the sequence
  MISC_FEATURE (6)..(6): Xaa is valine, leucine, isoleucine, alanine, methionine, or an amino acid residue which is covalently linked to another amino acid residue of the sequence
  MISC_FEATURE (7)..(7): Xaa is phenylalanine, tyrosine, valine, leucine, isoleucine, methionine, or an amino acid residue which is covalently linked to another amino acid residue of the sequence
  MISC_FEATURE (8)..(8): Xaa is phenylalanine, tyrosine, valine, leucine, isoleucine, methionine, or an amino acid residue which is covalently linked to another amino acid residue of the sequence
  MISC_FEATURE (9)..(9): Xaa is alanine, valine, glycine, serine, or an amino acid residue which is covalently linked to another amino acid residue of the sequence
  MISC_FEATURE (10)..(10): Xaa is glutamic acid, aspartic acid, or an amino acid residue which is covalently linked to another amino acid residue of the sequence
  MISC_FEATURE (17)..(17): Xaa is glycine, alanine, serine, or an amino acid residue which is covalently linked to another amino acid residue of the sequence
  MISC_FEATURE (18)..(18): Xaa is alanine, valine, glycine, serine, or an amino acid residue which is covalently linked to another amino acid residue of the sequence
  MISC_FEATURE (19)..(19): Xaa is isoleucine, leucine, valine, phenylalanine, methionine, or an amino acid residue which is covalently linked to another amino acid residue of the sequence
  MISC_FEATURE (20)..(20): Xaa is isoleucine, leucine, valine, phenylalanine, methionine, or an amino acid residue which is covalently linked to another amino acid residue of the sequence
  MISC_FEATURE (21)..(21): Xaa is glycine, alanine, serine, or an amino acid residue which is covalently linked to another amino acid residue of the sequence
  MISC_FEATURE (22)..(22): Xaa is leucine, isoleucine, valine, phenylalanine, methionine, or an amino acid residue which is covalently linked to another amino acid residue of the sequence
  MISC_FEATURE (23)..(23): Xaa is methionine, valine, leucine, isoleucine, alanine, or an amino acid residue which is covalently linked to another amino acid residue of the sequence
  MISC_FEATURE (24)..(24): Xaa is valine, leucine, isoleucine, alanine, methionine, or an amino acid residue which is covalently linked to another amino acid residue of the sequence
  MISC_FEATURE (25)..(25): Xaa is glycine, alanine, serine, or an amino acid residue which is covalently linked to another amino acid residue of the sequence
  MISC_FEATURE (26)..(26): Xaa is glycine, alanine, serine, or an amino acid residue which is covalently linked to another amino acid residue of the sequence
XXXXXXXXXXDVGSNKXXXXXXXXXXVV

SEQ ID NO: 448 - protein, 27 aa, Artificial Sequence
  synthetic
  MISC_FEATURE (1)..(1): Xaa is histidine, tyrosine, serine, methionine, or an amino acid residue which is covalently linked to another amino acid residue of the sequence
  MISC_FEATURE (2)..(2): Xaa is glutamine, asparagine, methionine, serine, or an amino acid which is covalently linked to another amino acid residue of the sequence
  MISC_FEATURE (3)..(3): Xaa is lysine, arginine, or an amino acid residue which is covalently linked to another amino acid residue of the sequence
  MISC_FEATURE (4)..(4): Xaa is leucine, isoleucine, valine, phenylalanine, methionine, or an amino acid residue which is covalently linked to another amino acid residue of the sequence
  MISC_FEATURE (5)..(5): Xaa is valine, leucine, isoleucine, alanine, methionine, or an amino acid residue which is covalently linked to another amino acid residue of the sequence
  MISC_FEATURE (6)..(6): Xaa is phenylalanine, tyrosine, valine, leucine, isoleucine, methionine, or an amino acid residue which is covalently linked to another amino acid residue of the sequence
  MISC_FEATURE (7)..(7): Xaa is phenylalanine, tyrosine, valine, leucine, isoleucine, methionine, or an amino acid residue which is covalently linked to another amino acid residue of the sequence
  MISC_FEATURE (8)..(8): Xaa is alanine, valine, glycine, serine, or an amino acid residue which is covalently linked to another amino acid residue of the sequence
  MISC_FEATURE (9)..(9): Xaa is glutamic acid, aspartic acid, or an amino acid residue which is covalently linked to another amino acid residue of the sequence
  MISC_FEATURE (16)..(16): Xaa is glycine, alanine, serine, or an amino acid residue which is covalently linked to another amino acid residue of the sequence
  MISC_FEATURE (17)..(17): Xaa is alanine, valine, glycine, serine, or an amino acid residue which is covalently linked to another amino acid residue of the sequence
  MISC_FEATURE (18)..(18): Xaa is isoleucine, leucine, valine, phenylalanine, methionine, or an amino acid residue which is covalently linked to another amino acid residue of the sequence
  MISC_FEATURE (19)..(19): Xaa is isoleucine, leucine, valine, phenylalanine, methionine, or an amino acid residue which is covalently linked to another amino acid residue of the sequence
  MISC_FEATURE (20)..(20): Xaa is glycine, alanine, serine, or an amino acid residue which is covalently linked to another amino acid residue of the sequence
  MISC_FEATURE (21)..(21): Xaa is leucine, isoleucine, valine, phenylalanine, methionine, or an amino acid residue which is covalently linked to another amino acid residue of the sequence
  MISC_FEATURE (22)..(22): Xaa is methionine, valine, leucine, isoleucine, alanine, or an amino acid residue which is covalently linked to another amino acid residue of the sequence
  MISC_FEATURE (23)..(23): Xaa is valine, leucine, isoleucine, alanine, methionine, or an amino acid residue which is covalently linked to another amino acid residue of the sequence
  MISC_FEATURE (24)..(24): Xaa is glycine, alanine, serine, or an amino acid residue which is covalently linked to another amino acid residue of the sequence
XXXXXXXXXDVGSNKXXXXXXXXXGVV

SEQ ID NO: 449 - protein, 26 aa, Artificial Sequence
  synthetic
  MISC_FEATURE (1)..(1): Xaa is glutamine, asparagine, methionine, serine, or an amino acid which is covalently linked to another amino acid residue of the sequence
  MISC_FEATURE (2)..(2): Xaa is lysine, arginine, or an amino acid residue which is covalently linked to another amino acid residue of the sequence
  MISC_FEATURE (3)..(3): Xaa is leucine, isoleucine, valine, phenylalanine, methionine, or an amino acid residue which is covalently linked to another amino acid residue of the sequence
  MISC_FEATURE (4)..(4): Xaa is valine, leucine, isoleucine, alanine, methionine, or an amino acid residue which is covalently linked to another amino acid residue of the sequence
  MISC_FEATURE (5)..(5): Xaa is phenylalanine, tyrosine, valine, leucine, isoleucine, methionine, or an amino acid residue which is covalently linked to another amino acid residue of the sequence
  MISC_FEATURE (6)..(6): Xaa is phenylalanine, tyrosine, valine, leucine, isoleucine, methionine, or an amino acid residue which is covalently linked to another amino acid residue of the sequence
  MISC_FEATURE (7)..(7): Xaa is alanine, valine, glycine, serine, or an amino acid residue which is covalently linked to another amino acid residue of the sequence
  MISC_FEATURE (8)..(8): Xaa is glutamic acid, aspartic acid, or an amino acid residue which is covalently linked to another amino acid residue of the sequence
  MISC_FEATURE (15)..(15): Xaa is glycine, alanine, serine, or an amino acid residue which is covalently linked to another amino acid residue of the sequence
  MISC_FEATURE (16)..(16): Xaa is alanine, valine, glycine, serine, or an amino acid residue which is covalently linked to another amino acid residue of the sequence
  MISC_FEATURE (17)..(17): Xaa is isoleucine, leucine, valine, phenylalanine, methionine, or an amino acid residue which is covalently linked to another amino acid residue of the sequence
  MISC_FEATURE (18)..(18): Xaa is isoleucine, leucine, valine, phenylalanine, methionine, or an amino acid residue which is covalently linked to another amino acid residue of the sequence
  MISC_FEATURE (19)..(19): Xaa is glycine, alanine, serine, or an amino acid residue which is covalently linked to another amino acid residue of the sequence
  MISC_FEATURE (20)..(20): Xaa is leucine, isoleucine, valine, phenylalanine, methionine, or an amino acid residue which is covalently linked to another amino acid residue of the sequence
  MISC_FEATURE (21)..(21): Xaa is methionine, valine, leucine, isoleucine, alanine, or an amino acid residue which is covalently linked to another amino acid residue of the sequence
  MISC_FEATURE (22)..(22): Xaa is valine, leucine, isoleucine, alanine, methionine, or an amino acid residue which is covalently linked to another amino acid residue of the sequence
XXXXXXXXDVGSNKXXXXXXXXGGVV

SEQ ID NO: 450 - protein, 25 aa, Artificial Sequence
  synthetic
  MISC_FEATURE (1)..(1): Xaa is lysine, arginine, or an amino acid residue which is covalently linked to another amino acid residue of the sequence
  MISC_FEATURE (2)..(2): Xaa is leucine, isoleucine, valine, phenylalanine, methionine, or an amino acid residue which is covalently linked to another amino acid residue of the sequence
  MISC_FEATURE (3)..(3): Xaa is valine, leucine, isoleucine, alanine, methionine, or an amino acid residue which is covalently linked to another amino acid residue of the sequence
  MISC_FEATURE (4)..(4): Xaa is phenylalanine, tyrosine, valine, leucine, isoleucine, methionine, or an amino acid residue which is covalently linked to another amino acid residue of the sequence
  MISC_FEATURE (5)..(5): Xaa is phenylalanine, tyrosine, valine, leucine, isoleucine, methionine, or an amino acid residue which is covalently linked to another amino acid residue of the sequence
  MISC_FEATURE (6)..(6): Xaa is alanine, valine, glycine, serine, or an amino acid residue which is covalently linked to another amino acid residue of the sequence
  MISC_FEATURE (7)..(7): Xaa is glutamic acid, aspartic acid, or an amino acid residue which is covalently linked to another amino acid residue of the sequence
  MISC_FEATURE (14)..(14): Xaa is glycine, alanine, serine, or an amino acid residue which is covalently linked to another amino acid residue of the sequence
  MISC_FEATURE (15)..(15): Xaa is alanine, valine, glycine, serine, or an amino acid residue which is covalently linked to another amino acid residue of the sequence
  MISC_FEATURE (16)..(16): Xaa is isoleucine, leucine, valine, phenylalanine, methionine, or an amino acid residue which is covalently linked to another amino acid residue of the sequence
  MISC_FEATURE (17)..(17): Xaa is isoleucine, leucine, valine, phenylalanine, methionine, or an amino acid residue which is covalently linked to another amino acid residue of the sequence
  MISC_FEATURE (18)..(18): Xaa is glycine, alanine, serine, or an amino acid residue which is covalently linked to another amino acid residue of the sequence
  MISC_FEATURE (19)..(19): Xaa is leucine, isoleucine, valine, phenylalanine, methionine, or an amino acid residue which is covalently linked to another amino acid residue of the sequence
  MISC_FEATURE (20)..(20): Xaa is methionine, valine, leucine, isoleucine, alanine, or an amino acid residue which is covalently linked to another amino acid residue of the sequence
XXXXXXXDVGSNKXXXXXXXVGGVV

SEQ ID NO: 451 - protein, 24 aa, Artificial Sequence
  synthetic
  MISC_FEATURE (1)..(1): Xaa is leucine, isoleucine, valine, phenylalanine, methionine, or an amino acid residue which is covalently linked to another amino acid residue of the sequence
  MISC_FEATURE (2)..(2): Xaa is valine, leucine, isoleucine, alanine, methionine, or an amino acid residue which is covalently linked to another amino acid residue of the sequence
  MISC_FEATURE (3)..(3): Xaa is phenylalanine, tyrosine, valine, leucine, isoleucine, methionine, or an amino acid residue which is covalently linked to another amino acid residue of the sequence
  MISC_FEATURE (4)..(4): Xaa is phenylalanine, tyrosine, valine, leucine, isoleucine, methionine, or an amino acid residue which is covalently linked to another amino acid residue of the sequence
  MISC_FEATURE (5)..(5): Xaa is alanine, valine, glycine, serine, or an amino acid residue which is covalently linked to another amino acid residue of the sequence
  MISC_FEATURE (6)..(6): Xaa is glutamic acid, aspartic acid, or an amino acid residue which is covalently linked to another amino acid residue of the sequence
  MISC_FEATURE (13)..(13): Xaa is glycine, alanine, serine, or an amino acid residue which is covalently linked to another amino acid residue of the sequence
  MISC_FEATURE (14)..(14): Xaa is alanine, valine, glycine, serine, or an amino acid residue which is covalently linked to another amino acid residue of the sequence
  MISC_FEATURE (15)..(15): Xaa is isoleucine, leucine, valine, phenylalanine, methionine, or an amino acid residue which is covalently linked to another amino acid residue of the sequence
  MISC_FEATURE (16)..(16): Xaa is isoleucine, leucine, valine, phenylalanine, methionine, or an amino acid residue which is covalently linked to another amino acid residue of the sequence
  MISC_FEATURE (17)..(17): Xaa is glycine, alanine, serine, or an amino acid residue which is covalently linked to another amino acid residue of the sequence
  MISC_FEATURE (18)..(18): Xaa is leucine, isoleucine, valine, phenylalanine, methionine, or an amino acid residue which is covalently linked to another amino acid residue of the sequence
XXXXXXDVGSNKXXXXXXMVGGVV

SEQ ID NO: 452 - protein, 23 aa, Artificial Sequence
  synthetic
  MISC_FEATURE (1)..(1): Xaa is valine, leucine, isoleucine, alanine, methionine, or an amino acid residue which is covalently linked to another amino acid residue of the sequence
  MISC_FEATURE (2)..(2): Xaa is phenylalanine, tyrosine, valine, leucine, isoleucine, methionine, or an amino acid residue which is covalently linked to another amino acid residue of the sequence
  MISC_FEATURE (3)..(3): Xaa is phenylalanine, tyrosine, valine, leucine, isoleucine, methionine, or an amino acid residue which is covalently linked to another amino acid residue of the sequence
  MISC_FEATURE (4)..(4): Xaa is alanine, valine, glycine, serine, or an amino acid residue which is covalently linked to another amino acid residue of the sequence
  MISC_FEATURE (5)..(5): Xaa is glutamic acid, aspartic acid, or an amino acid residue which is covalently linked to another amino acid residue of the sequence
  MISC_FEATURE (12)..(12): Xaa is glycine, alanine, serine, or an amino acid residue which is covalently linked to another amino acid residue of the sequence
  MISC_FEATURE (13)..(13): Xaa is alanine, valine, glycine, serine, or an amino acid residue which is covalently linked to another amino acid residue of the sequence
  MISC_FEATURE (14)..(14): Xaa is isoleucine, leucine, valine, phenylalanine, methionine, or an amino acid residue which is covalently linked to another amino acid residue of the sequence
  MISC_FEATURE (15)..(15): Xaa is isoleucine, leucine, valine, phenylalanine, methionine, or an amino acid residue which is covalently linked to another amino acid residue of the sequence
  MISC_FEATURE (16)..(16): Xaa is glycine, alanine, serine, or an amino acid residue which is covalently linked to another amino acid residue of the sequence
XXXXXDVGSNKXXXXXLMVGGVV

SEQ ID NO: 453 - protein, 22 aa, Artificial Sequence
  synthetic
  MISC_FEATURE (1)..(1): Xaa is phenylalanine, tyrosine, valine, leucine, isoleucine, methionine, or an amino acid residue which is covalently linked to another amino acid residue of the sequence
  MISC_FEATURE (2)..(2): Xaa is phenylalanine, tyrosine, valine, leucine, isoleucine, methionine, or an amino acid residue which is covalently linked to another amino acid residue of the sequence
  MISC_FEATURE (3)..(3): Xaa is alanine, valine, glycine, serine, or an amino acid residue which is covalently linked to another amino acid residue of the sequence
  MISC_FEATURE (4)..(4): Xaa is glutamic acid, aspartic acid, or an amino acid residue which is covalently linked to another amino acid residue of the sequence
  MISC_FEATURE (11)..(11): Xaa is glycine, alanine, serine, or an amino acid residue which is covalently linked to another amino acid residue of the sequence
  MISC_FEATURE (12)..(12): Xaa is alanine, valine, glycine, serine, or an amino acid residue which is covalently linked to another amino acid residue of the sequence
  MISC_FEATURE (13)..(13): Xaa is isoleucine, leucine, valine, phenylalanine, methionine, or an amino acid residue which is covalently linked to another amino acid residue of the sequence
  MISC_FEATURE (14)..(14): Xaa is isoleucine, leucine, valine, phenylalanine, methionine, or an amino acid residue which is covalently linked to another amino acid residue of the sequence
XXXXDVGSNKXXXXGLMVGGVV

SEQ ID NO: 454 - protein, 21 aa, Artificial Sequence
  synthetic
  MISC_FEATURE (1)..(1): Xaa is phenylalanine, tyrosine, valine, leucine, isoleucine, methionine, or an amino acid residue which is covalently linked to another amino acid residue of the sequence
  MISC_FEATURE (2)..(2): Xaa is alanine, valine, glycine, serine, or an amino acid residue which is covalently linked to another amino acid residue of the sequence
  MISC_FEATURE (3)..(3): Xaa is glutamic acid, aspartic acid, or an amino acid residue which is covalently linked to another amino acid residue of the sequence
  MISC_FEATURE (10)..(10): Xaa is glycine, alanine, serine, or an amino acid residue which is covalently linked to another amino acid residue of the sequence
  MISC_FEATURE (11)..(11): Xaa is alanine, valine, glycine, serine, or an amino acid residue which is covalently linked to another amino acid residue of the sequence
  MISC_FEATURE (12)..(12): Xaa is isoleucine, leucine, valine, phenylalanine, methionine, or an amino acid residue which is covalently linked to another amino acid residue of the sequence
XXXDVGSNKXXXIGLMVGGVV

SEQ ID NO: 455 - protein, 20 aa, Artificial Sequence
  synthetic
  MISC_FEATURE (1)..(1): Xaa is alanine, valine, glycine, serine, or an amino acid residue which is covalently linked to another amino acid residue of the sequence
  MISC_FEATURE (2)..(2): Xaa is glutamic acid, aspartic acid, or an amino acid residue which is covalently linked to another amino acid residue of the sequence
  MISC_FEATURE (9)..(9): Xaa is glycine, alanine, serine, or an amino acid residue which is covalently linked to another amino acid residue of the sequence
  MISC_FEATURE (10)..(10): Xaa is alanine, valine, glycine, serine, or an amino acid residue which is covalently linked to another amino acid residue of the sequence
XXDVGSNKXXIIGLMVGGVV

SEQ ID NO: 456 - protein, 19 aa, Artificial Sequence
  synthetic
  MISC_FEATURE (1)..(1): Xaa is glutamic acid, aspartic acid, or an amino acid residue which is covalently linked to another amino acid residue of the sequence
  MISC_FEATURE (8)..(8): Xaa is glycine, alanine, serine, or an amino acid residue which is covalently linked to another amino acid residue of the sequence
XDVGSNKXAIIGLMVGGVV

SEQ ID NO: 457 - protein, 39 aa, Artificial Sequence
  synthetic
  MISC_FEATURE (12)..(12): Xaa is valine, leucine, isoleucine, alanine, methionine, or an amino acid residue which is covalently linked to another amino acid residue of the sequence
  MISC_FEATURE (13)..(13): Xaa is histidine, tyrosine, serine, methionine, or an amino acid residue which is covalently linked to another amino acid residue of the sequence
  MISC_FEATURE (14)..(14): Xaa is histidine, tyrosine, serine, methionine, or an amino acid residue which is covalently linked to another amino acid residue of the sequence
  MISC_FEATURE (15)..(15): Xaa is glutamine, asparagine, methionine, serine, or an amino acid which is covalently linked to another amino acid residue of the sequence
  MISC_FEATURE (16)..(16): Xaa is lysine, arginine, or an amino acid residue which is covalently linked to another amino acid residue of the sequence
  MISC_FEATURE (17)..(17): Xaa is leucine, isoleucine, valine, phenylalanine, methionine, or an amino acid residue which is covalently linked to another amino acid residue of the sequence
  MISC_FEATURE (18)..(18): Xaa is valine, leucine, isoleucine, alanine, methionine, or an amino acid residue which is covalently linked to another amino acid residue of the sequence
  MISC_FEATURE (19)..(19): Xaa is phenylalanine, tyrosine, valine, leucine, isoleucine, methionine, or an amino acid residue which is covalently linked to another amino acid residue of the sequence
  MISC_FEATURE (20)..(20): Xaa is phenylalanine, tyrosine, valine, leucine, isoleucine, methionine, or an amino acid residue which is covalently linked to another amino acid residue of the sequence
  MISC_FEATURE (21)..(21): Xaa is alanine, valine, glycine, serine, or an amino acid residue which is covalently linked to another amino acid residue of the sequence
  MISC_FEATURE (22)..(22): Xaa is glutamic acid, aspartic acid, or an amino acid residue which is covalently linked to another amino acid residue of the sequence
  MISC_FEATURE (29)..(29): Xaa is glycine, alanine, serine, or an amino acid residue which is covalently linked to another amino acid residue of the sequence
  MISC_FEATURE (30)..(30): Xaa is alanine, valine, glycine, serine, or an amino acid residue which is covalently linked to another amino acid residue of the sequence
  MISC_FEATURE (31)..(31): Xaa is isoleucine, leucine, valine, phenylalanine, methionine, or an amino acid residue which is covalently linked to another amino acid residue of the sequence
  MISC_FEATURE (32)..(32): Xaa is isoleucine, leucine, valine, phenylalanine, methionine, or an amino acid residue which is covalently linked to another amino acid residue of the sequence
  MISC_FEATURE (33)..(33): Xaa is glycine, alanine, serine, or an amino acid residue which is covalently linked to another amino acid residue of the sequence
  MISC_FEATURE (34)..(34): Xaa is leucine, isoleucine, valine, phenylalanine, methionine, or an amino acid residue which is covalently linked to another amino acid residue of the sequence
  MISC_FEATURE (35)..(35): Xaa is methionine, valine, leucine, isoleucine, alanine, or an amino acid residue which is covalently linked to another amino acid residue of the sequence
  MISC_FEATURE (36)..(36): Xaa is valine, leucine, isoleucine, alanine, methionine, or an amino acid residue which is covalently linked to another amino acid residue of the sequence
  MISC_FEATURE (37)..(37): Xaa is glycine, alanine, serine, or an amino acid residue which is covalently linked to another amino acid residue of the sequence
  MISC_FEATURE (38)..(38): Xaa is glycine, alanine, serine, or an amino acid residue which is covalently linked to another amino acid residue of the sequence
  MISC_FEATURE (39)..(39): Xaa is valine, leucine, isoleucine, alanine, methionine, or an amino acid residue which is covalently linked to another amino acid residue of the sequence
DAEFRHDSGYEXXXXXXXXXXXDVGSNKXXXXXXXXXXX

SEQ ID NO: 458 - protein, 38 aa, Artificial Sequence
  synthetic
  MISC_FEATURE (11)..(11): Xaa is valine, leucine, isoleucine, alanine, methionine, or an amino acid residue which is covalently linked to another amino acid residue of the sequence
  MISC_FEATURE (12)..(12): Xaa is histidine, tyrosine, serine, methionine, or an amino acid residue which is covalently linked to another amino acid residue of the sequence
  MISC_FEATURE (13)..(13): Xaa is histidine, tyrosine, serine, methionine, or an amino acid residue which is covalently linked to another amino acid residue of the sequence
  MISC_FEATURE (14)..(14): Xaa is glutamine, asparagine, methionine, serine, or an amino acid which is covalently linked to another amino acid residue of the sequence
  MISC_FEATURE (15)..(15): Xaa is lysine, arginine, or an amino acid residue which is covalently linked to another amino acid residue of the sequence
  MISC_FEATURE (16)..(16): Xaa is leucine, isoleucine, valine, phenylalanine, methionine, or an amino acid residue which is covalently linked to another amino acid residue of the sequence
  MISC_FEATURE (17)..(17): Xaa is valine, leucine, isoleucine, alanine, methionine, or an amino acid residue which is covalently linked to another amino acid residue of the sequence
  MISC_FEATURE (18)..(18): Xaa is phenylalanine, tyrosine, valine, leucine, isoleucine, methionine, or an amino acid residue which is covalently linked to another amino acid residue of the sequence
  MISC_FEATURE (19)..(19): Xaa is phenylalanine, tyrosine, valine, leucine, isoleucine, methionine, or an amino acid residue which is covalently linked to another amino acid residue of the sequence
  MISC_FEATURE (20)..(20): Xaa is alanine, valine, glycine, serine, or an amino acid residue which is covalently linked to another amino acid residue of the sequence
  MISC_FEATURE (21)..(21): Xaa is glutamic acid, aspartic acid, or an amino acid residue which is covalently linked to another amino acid residue of the sequence
  MISC_FEATURE (28)..(28): Xaa is glycine, alanine, serine, or an amino acid residue which is covalently linked to another amino acid residue of the sequence
  MISC_FEATURE (29)..(29): Xaa is alanine, valine, glycine, serine, or an amino acid residue which is covalently linked to another amino acid residue of the sequence
  MISC_FEATURE (30)..(30): Xaa is isoleucine, leucine, valine, phenylalanine, methionine, or an amino acid residue which is covalently linked to another amino acid residue of the sequence
  MISC_FEATURE (31)..(31): Xaa is isoleucine, leucine, valine, phenylalanine, methionine, or an amino acid residue which is covalently linked to another amino acid residue of the sequence
  MISC_FEATURE (32)..(32): Xaa is glycine, alanine, serine, or an amino acid residue which is covalently linked to another amino acid residue of the sequence
  MISC_FEATURE (33)..(33): Xaa is leucine, isoleucine, valine, phenylalanine, methionine, or an amino acid residue which is covalently linked to another amino acid residue of the sequence
  MISC_FEATURE (34)..(34): Xaa is methionine, valine, leucine, isoleucine, alanine, or an amino acid residue which is covalently linked to another amino acid residue of the sequence
  MISC_FEATURE (35)..(35): Xaa is valine, leucine, isoleucine, alanine, methionine, or an amino acid residue which is covalently linked to another amino acid residue of the sequence
  MISC_FEATURE (36)..(36): Xaa is glycine, alanine, serine, or an amino acid residue which is covalently linked to another amino acid residue of the sequence
  MISC_FEATURE (37)..(37): Xaa is glycine, alanine, serine, or an amino acid residue which is covalently linked to another amino acid residue of the sequence
  MISC_FEATURE (38)..(38): Xaa is valine, leucine, isoleucine, alanine, methionine, or an amino acid residue which is covalently linked to another amino acid residue of the sequence
AEFRHDSGYEXXXXXXXXXXXDVGSNKXXXXXXXXXXX

SEQ ID NO: 459 - protein, 37 aa, Artificial Sequence
  synthetic
  MISC_FEATURE (10)..(10): Xaa is valine, leucine, isoleucine, alanine, methionine, or an amino acid residue which is covalently linked to another amino acid residue of the sequence
  MISC_FEATURE (11)..(11): Xaa is histidine, tyrosine, serine, methionine, or an amino acid residue which is covalently linked to another amino acid residue of the sequence
  MISC_FEATURE (12)..(12): Xaa is histidine, tyrosine, serine, methionine, or an amino acid residue which is covalently linked to another amino acid residue of the sequence
  MISC_FEATURE (13)..(13): Xaa is glutamine, asparagine, methionine, serine, or an amino acid which is covalently linked to another amino acid residue of the sequence
  MISC_FEATURE (14)..(14): Xaa is lysine, arginine, or an amino acid residue which is covalently linked to another amino acid residue of the sequence
  MISC_FEATURE (15)..(15): Xaa is leucine, isoleucine, valine, phenylalanine, methionine, or an amino acid residue which is covalently linked to another amino acid residue of the sequence
  MISC_FEATURE (16)..(16): Xaa is valine, leucine, isoleucine, alanine, methionine, or an amino acid residue which is covalently linked to another amino acid residue of the sequence
  MISC_FEATURE (17)..(17): Xaa is phenylalanine, tyrosine, valine, leucine, isoleucine, methionine, or an amino acid residue which is covalently linked to another amino acid residue of the sequence
  MISC_FEATURE (18)..(18): Xaa is phenylalanine, tyrosine, valine, leucine, isoleucine, methionine, or an amino acid residue which is covalently linked to another amino acid residue of the sequence
  MISC_FEATURE (19)..(19): Xaa is alanine, valine, glycine, serine, or an amino acid residue which is covalently linked to another amino acid residue of the sequence
  MISC_FEATURE (20)..(20): Xaa is glutamic acid, aspartic acid, or an amino acid residue which is covalently linked to another amino acid residue of the sequence
  MISC_FEATURE (27)..(27): Xaa is glycine, alanine, serine, or an amino acid residue which is covalently linked to another amino acid residue of the sequence
  MISC_FEATURE (28)..(28): Xaa is alanine, valine, glycine, serine, or an amino acid residue which is covalently linked to another amino acid residue of the sequence
  MISC_FEATURE (29)..(29): Xaa is isoleucine, leucine, valine, phenylalanine, methionine, or an amino acid residue which is covalently linked to another amino acid residue of the sequence
  MISC_FEATURE (30)..(30): Xaa is isoleucine, leucine, valine, phenylalanine, methionine, or an amino acid residue which is covalently linked to another amino acid residue of the sequence
  MISC_FEATURE (31)..(31): Xaa is glycine, alanine, serine, or an amino acid residue which is covalently linked to another amino acid residue of the sequence
  MISC_FEATURE (32)..(32): Xaa is leucine, isoleucine, valine, phenylalanine, methionine, or an amino acid residue which is covalently linked to another amino acid residue of the sequence
  MISC_FEATURE (33)..(33): Xaa is methionine, valine, leucine, isoleucine, alanine, or an amino acid residue which is covalently linked to another amino acid residue of the sequence
  MISC_FEATURE (34)..(34): Xaa is valine, leucine, isoleucine, alanine, methionine, or an amino acid residue which is covalently linked to another amino acid residue of the sequence
  MISC_FEATURE (35)..(35): Xaa is glycine, alanine, serine, or an amino acid residue which is covalently linked to another amino acid residue of the sequence
  MISC_FEATURE (36)..(36): Xaa is glycine, alanine, serine, or an amino acid residue which is covalently linked to another amino acid residue of the sequence
  MISC_FEATURE (37)..(37): Xaa is valine, leucine, isoleucine, alanine, methionine, or an amino acid residue which is covalently linked to another amino acid residue of the sequence
EFRHDSGYEXXXXXXXXXXXDVGSNKXXXXXXXXXXX

SEQ ID NO: 460 - protein, 36 aa, Artificial Sequence
  synthetic
  MISC_FEATURE (9)..(9): Xaa is valine, leucine, isoleucine, alanine, methionine, or an amino acid residue which is covalently linked to another amino acid residue of the sequence
  MISC_FEATURE (10)..(10): Xaa is histidine, tyrosine, serine, methionine, or an amino acid residue which is covalently linked to another amino acid residue of the sequence
  MISC_FEATURE (11)..(11): Xaa is histidine, tyrosine, serine, methionine, or an amino acid residue which is covalently linked to another amino acid residue of the sequence
  MISC_FEATURE (12)..(12): Xaa is glutamine, asparagine, methionine, serine, or an amino acid which is covalently linked to another amino acid residue of the sequence
  MISC_FEATURE (13)..(13): Xaa is lysine, arginine, or an amino acid residue which is covalently linked to another amino acid residue of the sequence
  MISC_FEATURE (14)..(14): Xaa is leucine, isoleucine, valine, phenylalanine, methionine, or an amino acid residue which is covalently linked to another amino acid residue of the sequence
  MISC_FEATURE (15)..(15): Xaa is valine, leucine, isoleucine, alanine, methionine, or an amino acid residue which is covalently linked to another amino acid residue of the sequence
  MISC_FEATURE (16)..(16): Xaa is phenylalanine, tyrosine, valine, leucine, isoleucine, methionine, or an amino acid residue which is covalently linked to another amino acid residue of the sequence
  MISC_FEATURE (17)..(17): Xaa is phenylalanine, tyrosine, valine, leucine, isoleucine, methionine, or an amino acid residue which is covalently linked to another amino acid residue of the sequence
  MISC_FEATURE (18)..(18): Xaa is alanine, valine, glycine, serine, or an amino acid residue which is covalently linked to another amino acid residue of the sequence
  MISC_FEATURE (19)..(19): Xaa is glutamic acid, aspartic acid, or an amino acid residue which is covalently linked to another amino acid residue of the sequence
  MISC_FEATURE (26)..(26): Xaa is glycine, alanine, serine, or an amino acid residue which is covalently linked to another amino acid residue of the sequence
  MISC_FEATURE (27)..(27): Xaa is alanine, valine, glycine, serine, or an amino acid residue which is covalently linked to another amino acid residue of the sequence
  MISC_FEATURE (28)..(28): Xaa is isoleucine, leucine, valine, phenylalanine, methionine, or an amino acid residue which is covalently linked to another amino acid residue of the sequence
  MISC_FEATURE (29)..(29): Xaa is isoleucine, leucine, valine, phenylalanine, methionine, or an amino acid residue which is covalently linked to another amino acid residue of the sequence
  MISC_FEATURE (30)..(30): Xaa is glycine, alanine, serine, or an amino acid residue which is covalently linked to another amino acid residue of the sequence
  MISC_FEATURE (31)..(31): Xaa is leucine, isoleucine, valine, phenylalanine, methionine, or an amino acid residue which is covalently linked to another amino acid residue of the sequence
  MISC_FEATURE (32)..(32): Xaa is methionine, valine, leucine, isoleucine, alanine, or an amino acid residue which is covalently linked to another amino acid residue of the sequence
  MISC_FEATURE (33)..(33): Xaa is valine, leucine, isoleucine, alanine, methionine, or an amino acid residue which is covalently linked to another amino acid residue of the sequence
  MISC_FEATURE (34)..(34): Xaa is glycine, alanine, serine, or an amino acid residue which is covalently linked to another amino acid residue of the sequence
  MISC_FEATURE (35)..(35): Xaa is glycine, alanine, serine, or an amino acid residue which is covalently linked to another amino acid residue of the sequence
  MISC_FEATURE (36)..(36): Xaa is valine, leucine, isoleucine, alanine, methionine, or an amino acid residue which is covalently linked to another amino acid residue of the sequence
FRHDSGYEXXXXXXXXXXXDVGSNKXXXXXXXXXXX

SEQ ID NO: 461 - protein, 35 aa, Artificial Sequence
  synthetic
  MISC_FEATURE (8)..(8): Xaa is valine, leucine, isoleucine, alanine, methionine, or an amino acid residue which is covalently linked to another amino acid residue of the sequence
  MISC_FEATURE (9)..(9): Xaa is histidine, tyrosine, serine, methionine, or an amino acid residue which is covalently linked to another amino acid residue of the sequence
  MISC_FEATURE (10)..(10): Xaa is histidine, tyrosine, serine, methionine, or an amino acid residue which is covalently linked to another amino acid residue of the sequence
  MISC_FEATURE (11)..(11): Xaa is glutamine, asparagine, methionine, serine, or an amino acid which is covalently linked to another amino acid residue of the sequence
  MISC_FEATURE (12)..(12): Xaa is lysine, arginine, or an amino acid residue which is covalently linked to another amino acid residue of the sequence
  MISC_FEATURE (13)..(13): Xaa is leucine, isoleucine, valine, phenylalanine, methionine, or an amino acid residue which is covalently linked to another amino acid residue of the sequence
  MISC_FEATURE (14)..(14): Xaa is valine, leucine, isoleucine, alanine, methionine, or an amino acid residue which is covalently linked to another amino acid residue of the sequence
  MISC_FEATURE (15)..(15): Xaa is phenylalanine, tyrosine, valine, leucine, isoleucine, methionine, or an amino acid residue which is covalently linked to another amino acid residue of the sequence
  MISC_FEATURE (16)..(16): Xaa is phenylalanine, tyrosine, valine, leucine, isoleucine, methionine, or an amino acid residue which is covalently linked to another amino acid residue of the sequence
  MISC_FEATURE (17)..(17): Xaa is alanine, valine, glycine, serine, or an amino acid residue which is covalently linked to another amino acid residue of the sequence
  MISC_FEATURE (18)..(18): Xaa is glutamic acid, aspartic acid, or an amino acid residue which is covalently linked to another amino acid residue of the sequence
  MISC_FEATURE (25)..(25): Xaa is glycine, alanine, serine, or an amino acid residue which is covalently linked to another amino acid residue of the sequence
  MISC_FEATURE (26)..(26): Xaa is alanine, valine, glycine, serine, or an amino acid residue which is covalently linked to another amino acid residue of the sequence
  MISC_FEATURE (27)..(27): Xaa is isoleucine, leucine, valine, phenylalanine, methionine, or an amino acid residue which is covalently linked to another amino acid residue of the sequence
  MISC_FEATURE (28)..(28): Xaa is isoleucine, leucine, valine, phenylalanine, methionine, or an amino acid residue which is covalently linked to another amino acid residue of the sequence
  MISC_FEATURE (29)..(29): Xaa is glycine, alanine, serine, or an amino acid residue which is covalently linked to another amino acid residue of the sequence
  MISC_FEATURE (30)..(30): Xaa is leucine, isoleucine, valine, phenylalanine, methionine, or an amino acid residue which is covalently linked to another amino acid residue of the sequence
  MISC_FEATURE (31)..(31): Xaa is methionine, valine, leucine, isoleucine, alanine, or an amino acid residue which is covalently linked to another amino acid residue of the sequence
  MISC_FEATURE (32)..(32): Xaa is valine, leucine, isoleucine, alanine, methionine, or an amino acid residue which is covalently linked to another amino acid residue of the sequence
  MISC_FEATURE (33)..(33): Xaa is glycine, alanine, serine, or an amino acid residue which is covalently linked to another amino acid residue of the sequence
  MISC_FEATURE (34)..(34): Xaa is glycine, alanine, serine, or an amino acid residue which is covalently linked to another amino acid residue of the sequence
  MISC_FEATURE (35)..(35): Xaa is valine, leucine, isoleucine, alanine, methionine, or an amino acid residue which is covalently linked to another amino acid residue of the sequence
RHDSGYEXXXXXXXXXXXDVGSNKXXXXXXXXXXX

SEQ ID NO: 462 - protein, 34 aa, Artificial Sequence
  synthetic
  MISC_FEATURE (7)..(7): Xaa is valine, leucine, isoleucine, alanine, methionine, or an amino acid residue which is covalently linked to another amino acid residue of the sequence
  MISC_FEATURE (8)..(8): Xaa is histidine, tyrosine, serine, methionine, or an amino acid residue which is covalently linked to another amino acid residue of the sequence
  MISC_FEATURE (9)..(9): Xaa is histidine, tyrosine, serine, methionine, or an amino acid residue which is covalently linked to another amino acid residue of the sequence
  MISC_FEATURE (10)..(10): Xaa is glutamine, asparagine, methionine, serine, or an amino acid which is covalently linked to another amino acid residue of the sequence
  MISC_FEATURE (11)..(11): Xaa is lysine, arginine, or an amino acid residue which is covalently linked to another amino acid residue of the sequence
  MISC_FEATURE (12)..(12): Xaa is leucine, isoleucine, valine, phenylalanine, methionine, or an amino acid residue which is covalently linked to another amino acid residue of the sequence
  MISC_FEATURE (13)..(13): Xaa is valine, leucine, isoleucine, alanine, methionine, or an amino acid residue which is covalently linked to another amino acid residue of the sequence
  MISC_FEATURE (14)..(14): Xaa is phenylalanine, tyrosine, valine, leucine, isoleucine, methionine, or an amino acid residue which is covalently linked to another amino acid residue of the sequence
  MISC_FEATURE (15)..(15): Xaa is phenylalanine, tyrosine, valine, leucine, isoleucine, methionine, or an amino acid residue which is covalently linked to another amino acid residue of the sequence
  MISC_FEATURE (16)..(16): Xaa is alanine, valine, glycine, serine, or an amino acid residue which is covalently linked to another amino acid residue of the sequence
  MISC_FEATURE (17)..(17): Xaa is glutamic acid, aspartic acid, or an amino acid residue which is covalently linked to another amino acid residue of the sequence
  MISC_FEATURE (24)..(24): Xaa is glycine, alanine, serine, or an amino acid residue which is covalently linked to another amino acid residue of the sequence
  MISC_FEATURE (25)..(25): Xaa is alanine, valine, glycine, serine, or an amino acid residue which is covalently linked to another amino acid residue of the sequence
  MISC_FEATURE (26)..(26): Xaa is isoleucine, leucine, valine, phenylalanine, methionine, or an amino acid residue which is covalently linked to another amino acid residue of the sequence
  MISC_FEATURE (27)..(27): Xaa is isoleucine, leucine, valine, phenylalanine, methionine, or an amino acid residue which is covalently linked to another amino acid residue of the sequence
  MISC_FEATURE (28)..(28): Xaa is glycine, alanine, serine, or an amino acid residue which is covalently linked to another amino acid residue of the sequence
  MISC_FEATURE (29)..(29): Xaa is leucine, isoleucine, valine, phenylalanine, methionine, or an amino acid residue which is covalently linked to another amino acid residue of the sequence
  MISC_FEATURE (30)..(30): Xaa is methionine, valine, leucine, isoleucine, alanine, or an amino acid residue which is covalently linked to another amino acid residue of the sequence
  MISC_FEATURE (31)..(31): Xaa is valine, leucine, isoleucine, alanine, methionine, or an amino acid residue which is covalently linked to another amino acid residue of the sequence
  MISC_FEATURE (32)..(32): Xaa is glycine, alanine, serine, or an amino acid residue which is covalently linked to another amino acid residue of the sequence
  MISC_FEATURE (33)..(33): Xaa is glycine, alanine, serine, or an amino acid residue which is covalently linked to another amino acid residue of the sequence
  MISC_FEATURE (34)..(34): Xaa is valine, leucine, isoleucine, alanine, methionine, or an amino acid residue which is covalently linked to another amino acid residue of the sequence
HDSGYEXXXXXXXXXXXDVGSNKXXXXXXXXXXX

SEQ ID NO: 463 - protein, 33 aa, Artificial Sequence
  synthetic
  MISC_FEATURE (6)..(6): Xaa is valine, leucine, isoleucine, alanine, methionine, or an amino acid residue which is covalently linked to another amino acid residue of the sequence
  MISC_FEATURE (7)..(7): Xaa is histidine, tyrosine, serine, methionine, or an amino acid residue which is covalently linked to another amino acid residue of the sequence
  MISC_FEATURE (8)..(8): Xaa is histidine, tyrosine, serine, methionine, or an amino acid residue which is covalently linked to another amino acid residue of the sequence
  MISC_FEATURE (9)..(9): Xaa is glutamine, asparagine, methionine, serine, or an amino acid which is covalently linked to another amino acid residue of the sequence
  MISC_FEATURE (10)..(10): Xaa is lysine, arginine, or an amino acid residue which is covalently linked to another amino acid residue of the sequence
  MISC_FEATURE (11)..(11): Xaa is leucine, isoleucine, valine, phenylalanine, methionine, or an amino acid residue which is covalently linked to another amino acid residue of the sequence
  MISC_FEATURE (12)..(12): Xaa is valine, leucine, isoleucine, alanine, methionine, or an amino acid residue which is covalently linked to another amino acid residue of the sequence
  MISC_FEATURE (13)..(13): Xaa is phenylalanine, tyrosine, valine, leucine, isoleucine, methionine, or an amino acid residue which is covalently linked to another amino acid residue of the sequence
  MISC_FEATURE (14)..(14): Xaa is phenylalanine, tyrosine, valine, leucine, isoleucine, methionine, or an amino acid residue which is covalently linked to another amino acid residue of the sequence
  MISC_FEATURE (15)..(15): Xaa is alanine, valine, glycine, serine, or an amino acid residue which is covalently linked to another amino acid residue of the sequence
  MISC_FEATURE (16)..(16): Xaa is glutamic acid, aspartic acid, or an amino acid residue which is covalently linked to another amino acid residue of the sequence
  MISC_FEATURE (23)..(23): Xaa is glycine, alanine, serine, or an amino acid residue which is covalently linked to another amino acid residue of the sequence
  MISC_FEATURE (24)..(24): Xaa is alanine, valine, glycine, serine, or an amino acid residue which is covalently linked to another amino acid residue of the sequence
  MISC_FEATURE (25)..(25): Xaa is isoleucine, leucine, valine, phenylalanine, methionine, or an amino acid residue which is covalently linked to another amino acid residue of the sequence
  MISC_FEATURE (26)..(26): Xaa is isoleucine, leucine, valine, phenylalanine, methionine, or an amino acid residue which is covalently linked to another amino acid residue of the sequence
  MISC_FEATURE (27)..(27): Xaa is glycine, alanine, serine, or an amino acid residue which is covalently linked to another amino acid residue of the sequence
  MISC_FEATURE (28)..(28): Xaa is leucine, isoleucine, valine, phenylalanine, methionine, or an amino acid residue which is covalently linked to another amino acid residue of the sequence
  MISC_FEATURE (29)..(29): Xaa is methionine, valine, leucine, isoleucine, alanine, or an amino acid residue which is covalently linked to another amino acid residue of the sequence
  MISC_FEATURE (30)..(30): Xaa is valine, leucine, isoleucine, alanine, methionine, or an amino acid residue which is covalently linked to another amino acid residue of the sequence
  MISC_FEATURE (31)..(31): Xaa is glycine, alanine, serine, or an amino acid residue which is covalently linked to another amino acid residue of the sequence
  MISC_FEATURE (32)..(32): Xaa is glycine, alanine, serine, or an amino acid residue which is covalently linked to another amino acid residue of the sequence
  MISC_FEATURE (33)..(33): Xaa is valine, leucine, isoleucine, alanine, methionine, or an amino acid residue which is covalently linked to another amino acid residue of the sequence
DSGYEXXXXXXXXXXXDVGSNKXXXXXXXXXXX

SEQ ID NO: 464 - protein, 32 aa, Artificial Sequence
  synthetic
  MISC_FEATURE (5)..(5): Xaa is valine, leucine, isoleucine, alanine, methionine, or an amino acid residue which is covalently linked to another amino acid residue of the sequence
  MISC_FEATURE (6)..(6): Xaa is histidine, tyrosine, serine, methionine, or an amino acid residue which is covalently linked to another amino acid residue of the sequence
  MISC_FEATURE (7)..(7): Xaa is histidine, tyrosine, serine, methionine, or an amino acid residue which is covalently linked to another amino acid residue of the sequence
  MISC_FEATURE (8)..(8): Xaa is glutamine, asparagine, methionine, serine, or an amino acid which is covalently linked to another amino acid residue of the sequence
  MISC_FEATURE (9)..(9): Xaa is lysine, arginine, or an amino acid residue which is covalently linked to another amino acid residue of the sequence
  MISC_FEATURE (10)..(10): Xaa is leucine, isoleucine, valine, phenylalanine, methionine, or an amino acid residue which is covalently linked to another amino acid residue of the sequence
  MISC_FEATURE (11)..(11): Xaa is valine, leucine, isoleucine, alanine, methionine, or an amino acid residue which is covalently linked to another amino acid residue of the sequence
  MISC_FEATURE (12)..(12): Xaa is phenylalanine, tyrosine, valine, leucine, isoleucine, methionine, or an amino acid residue which is covalently linked to another amino acid residue of the sequence
  MISC_FEATURE (13)..(13): Xaa is phenylalanine, tyrosine, valine, leucine, isoleucine, methionine, or an amino acid residue which is covalently linked to another amino acid residue of the sequence
  MISC_FEATURE (14)..(14): Xaa is alanine, valine, glycine, serine, or an amino acid residue which is covalently linked to another amino acid residue of the sequence
  MISC_FEATURE (15)..(15): Xaa is glutamic acid, aspartic acid, or an amino acid residue which is covalently linked to another amino acid residue of the sequence
  MISC_FEATURE (22)..(22): Xaa is glycine, alanine, serine, or an amino acid residue which is covalently linked to another amino acid residue of the sequence
  MISC_FEATURE (23)..(23): Xaa is alanine, valine, glycine, serine, or an amino acid residue which is covalently linked to another amino acid residue of the sequence
  MISC_FEATURE (24)..(24): Xaa is isoleucine, leucine, valine, phenylalanine, methionine, or an amino acid residue which is covalently linked to another amino acid residue of the sequence
  MISC_FEATURE (25)..(25): Xaa is isoleucine, leucine, valine, phenylalanine, methionine, or an amino acid residue which is covalently linked to another amino acid residue of the sequence
  MISC_FEATURE (26)..(26): Xaa is glycine, alanine, serine, or an amino acid residue which is covalently linked to another amino acid residue of the sequence
  MISC_FEATURE (27)..(27): Xaa is leucine, isoleucine, valine, phenylalanine, methionine, or an amino acid residue which is covalently linked to another amino acid residue of the sequence
  MISC_FEATURE (28)..(28): Xaa is methionine, valine, leucine, isoleucine, alanine, or an amino acid residue which is covalently linked to another amino acid residue of the sequence
  MISC_FEATURE (29)..(29): Xaa is valine, leucine, isoleucine, alanine, methionine, or an amino acid residue which is covalently linked to another amino acid residue of the sequence
  MISC_FEATURE (30)..(30): Xaa is glycine, alanine, serine, or an amino acid residue which is covalently linked to another amino acid residue of the sequence
  MISC_FEATURE (31)..(31): Xaa is glycine, alanine, serine, or an amino acid residue which is covalently linked to another amino acid residue of the sequence
  MISC_FEATURE (32)..(32): Xaa is valine, leucine, isoleucine, alanine, methionine, or an amino acid residue which is covalently linked to another amino acid residue of the sequence
SGYEXXXXXXXXXXXDVGSNKXXXXXXXXXXX

SEQ ID NO: 465 - protein, 31 aa, Artificial Sequence
  synthetic
  MISC_FEATURE (4)..(4): Xaa is valine, leucine, isoleucine, alanine, methionine, or an amino acid residue which is covalently linked to another amino acid residue of the sequence
  MISC_FEATURE (5)..(5): Xaa is histidine, tyrosine, serine, methionine, or an amino acid residue which is covalently linked to another amino acid residue of the sequence
  MISC_FEATURE (6)..(6): Xaa is histidine, tyrosine, serine, methionine, or an amino acid residue which is covalently linked to another amino acid residue of the sequence
  MISC_FEATURE (7)..(7): Xaa is glutamine, asparagine, methionine, serine, or an amino acid which is covalently linked to another amino acid residue of the sequence
  MISC_FEATURE (8)..(8): Xaa is lysine, arginine, or an amino acid residue which is covalently linked to another amino acid residue of the sequence
  MISC_FEATURE (9)..(9): Xaa is leucine, isoleucine, valine, phenylalanine, methionine, or an amino acid residue which is covalently linked to another amino acid residue of the sequence
  MISC_FEATURE (10)..(10): Xaa is valine, leucine, isoleucine, alanine, methionine, or an amino acid residue which is covalently linked to another amino acid residue of the sequence
  MISC_FEATURE (11)..(11): Xaa is phenylalanine, tyrosine, valine, leucine, isoleucine, methionine, or an amino acid residue which is covalently linked to another amino acid residue of the sequence
  MISC_FEATURE (12)..(12): Xaa is phenylalanine, tyrosine, valine, leucine, isoleucine, methionine, or an amino acid residue which is covalently linked to another amino acid residue of the sequence
  MISC_FEATURE (13)..(13): Xaa is alanine, valine, glycine, serine, or an amino acid residue which is covalently linked to another amino acid residue of the sequence
  MISC_FEATURE (14)..(14): Xaa is glutamic acid, aspartic acid, or an amino acid residue which is covalently linked to another amino acid residue of the sequence
  MISC_FEATURE (21)..(21): Xaa is glycine, alanine, serine, or an amino acid residue which is covalently linked to another amino acid residue of the sequence
  MISC_FEATURE (22)..(22): Xaa is alanine, valine, glycine, serine, or an amino acid residue which is covalently linked to another amino acid residue of the sequence
  MISC_FEATURE (23)..(23): Xaa is isoleucine, leucine, valine, phenylalanine, methionine, or an amino acid residue which is covalently linked to another amino acid residue of the sequence
  MISC_FEATURE (24)..(24): Xaa is isoleucine, leucine, valine, phenylalanine, methionine, or an amino acid residue which is covalently linked to another amino acid residue of the sequence
  MISC_FEATURE (25)..(25): Xaa is glycine, alanine, serine, or an amino acid residue which is covalently linked to another amino acid residue of the sequence
  MISC_FEATURE (26)..(26): Xaa is leucine, isoleucine, valine, phenylalanine, methionine, or an amino acid residue which is covalently linked to another amino acid residue of the sequence
  MISC_FEATURE (27)..(27): Xaa is methionine, valine, leucine, isoleucine, alanine, or an amino acid residue which is covalently linked to another amino acid residue of the sequence
  MISC_FEATURE (28)..(28): Xaa is valine, leucine, isoleucine, alanine, methionine, or an amino acid residue which is covalently linked to another amino acid residue of the sequence
  MISC_FEATURE (29)..(29): Xaa is glycine, alanine, serine, or an amino acid residue which is covalently linked to another amino acid residue of the sequence
  MISC_FEATURE (30)..(30): Xaa is glycine, alanine, serine, or an amino acid residue which is covalently linked to another amino acid residue of the sequence
  MISC_FEATURE (31)..(31): Xaa is valine, leucine, isoleucine, alanine, methionine, or an amino acid residue which is covalently linked to another amino acid residue of the sequence
GYEXXXXXXXXXXXDVGSNKXXXXXXXXXXX

SEQ ID NO: 466 - protein, 30 aa, Artificial Sequence
  synthetic
  MISC_FEATURE (3)..(3): Xaa is valine, leucine, isoleucine, alanine, methionine, or an amino acid residue which is covalently linked to another amino acid residue of the sequence
  MISC_FEATURE (4)..(4): Xaa is histidine, tyrosine, serine, methionine, or an amino acid residue which is covalently linked to another amino acid residue of the sequence
  MISC_FEATURE (5)..(5): Xaa is histidine, tyrosine, serine, methionine, or an amino acid residue which is covalently linked to another amino acid residue of the sequence
  MISC_FEATURE (6)..(6): Xaa is glutamine, asparagine, methionine, serine, or an amino acid which is covalently linked to another amino acid residue of the sequence
  MISC_FEATURE (7)..(7): Xaa is lysine, arginine, or an amino acid residue which is covalently linked to another amino acid residue of the sequence
  MISC_FEATURE (8)..(8): Xaa is leucine, isoleucine, valine, phenylalanine, methionine, or an amino acid residue which is covalently linked to another amino acid residue of the sequence
  MISC_FEATURE (9)..(9): Xaa is valine, leucine, isoleucine, alanine, methionine, or an amino acid residue which is covalently linked to another amino acid residue of the sequence
  MISC_FEATURE (10)..(10): Xaa is phenylalanine, tyrosine, valine, leucine, isoleucine, methionine, or an amino acid residue which is covalently linked to another amino acid residue of the sequence
  MISC_FEATURE (11)..(11): Xaa is phenylalanine, tyrosine, valine, leucine, isoleucine, methionine, or an amino acid residue which is covalently linked to another amino acid residue of the sequence
  MISC_FEATURE (12)..(12): Xaa is alanine, valine, glycine, serine, or an amino acid residue which is covalently linked to another amino acid residue of the sequence
  MISC_FEATURE (13)..(13): Xaa is glutamic acid, aspartic acid, or an amino acid residue which is covalently linked to another amino acid residue of the sequence
  MISC_FEATURE (20)..(20): Xaa is glycine, alanine, serine, or an amino acid residue which is covalently linked to another amino acid residue of the sequence
  MISC_FEATURE (21)..(21): Xaa is alanine, valine, glycine, serine, or an amino acid residue which is covalently linked to another amino acid residue of the sequence
  MISC_FEATURE (22)..(22): Xaa is isoleucine, leucine, valine, phenylalanine, methionine, or an amino acid residue which is covalently linked to another amino acid residue of the sequence
  MISC_FEATURE (23)..(23): Xaa is isoleucine, leucine, valine, phenylalanine, methionine, or an amino acid residue which is covalently linked to another amino acid residue of the sequence
  MISC_FEATURE (24)..(24): Xaa is glycine, alanine, serine, or an amino acid residue which is covalently linked to another amino acid residue of the sequence
  MISC_FEATURE (25)..(25): Xaa is leucine, isoleucine, valine, phenylalanine, methionine, or an amino acid residue which is covalently linked to another amino acid residue of the sequence
  MISC_FEATURE (26)..(26): Xaa is methionine, valine, leucine, isoleucine, alanine, or an amino acid residue which is covalently linked to another amino acid residue of the sequence
  MISC_FEATURE (27)..(27): Xaa is valine, leucine, isoleucine, alanine, methionine, or an amino acid residue which is covalently linked to another amino acid residue of the sequence
  MISC_FEATURE (28)..(28): Xaa is glycine, alanine, serine, or an amino acid residue which is covalently linked to another amino acid residue of the sequence
  MISC_FEATURE (29)..(29): Xaa is glycine, alanine, serine, or an amino acid residue which is covalently linked to another amino acid residue of the sequence
  MISC_FEATURE (30)..(30): Xaa is valine, leucine, isoleucine, alanine, methionine, or an amino acid residue which is covalently linked to another amino acid residue of the sequence
YEXXXXXXXXXXXDVGSNKXXXXXXXXXXX

SEQ ID NO: 467 - protein, 29 aa, Artificial Sequence
  synthetic
  MISC_FEATURE (2)..(2): Xaa is valine, leucine, isoleucine, alanine, methionine, or an amino acid residue which is covalently linked to another amino acid residue of the sequence
  MISC_FEATURE (3)..(3): Xaa is histidine, tyrosine, serine, methionine, or an amino acid residue which is covalently linked to another amino acid residue of the sequence
  MISC_FEATURE (4)..(4): Xaa is histidine, tyrosine, serine, methionine, or an amino acid residue which is covalently linked to another amino acid residue of the sequence
  MISC_FEATURE (5)..(5): Xaa is glutamine, asparagine, methionine, serine, or an amino acid which is covalently linked to another amino acid residue of the sequence
  MISC_FEATURE (6)..(6): Xaa is lysine, arginine, or an amino acid residue which is covalently linked to another amino acid residue of the sequence
  MISC_FEATURE (7)..(7): Xaa is leucine, isoleucine, valine, phenylalanine, methionine, or an amino acid residue which is covalently linked to another amino acid residue of the sequence
  MISC_FEATURE (8)..(8): Xaa is valine, leucine, isoleucine, alanine, methionine, or an amino acid residue which is covalently linked to another amino acid residue of the sequence
  MISC_FEATURE (9)..(9): Xaa is phenylalanine, tyrosine, valine, leucine, isoleucine, methionine, or an amino acid residue which is covalently linked to another amino acid residue of the sequence
  MISC_FEATURE (10)..(10): Xaa is phenylalanine, tyrosine, valine, leucine, isoleucine, methionine, or an amino acid residue which is covalently linked to another amino acid residue of the sequence
  MISC_FEATURE (11)..(11): Xaa is alanine, valine, glycine, serine, or an amino acid residue which is covalently linked to another amino acid residue of the sequence
  MISC_FEATURE (12)..(12): Xaa is glutamic acid, aspartic acid, or an amino acid residue which is covalently linked to another amino acid residue of the sequence
  MISC_FEATURE (19)..(19): Xaa is glycine, alanine, serine, or an amino acid residue which is covalently linked to another amino acid residue of the sequence
  MISC_FEATURE (20)..(20): Xaa is alanine, valine, glycine, serine, or an amino acid residue which is covalently linked to another amino acid residue of the sequence
  MISC_FEATURE (21)..(21): Xaa is isoleucine, leucine, valine, phenylalanine, methionine, or an amino acid residue which is covalently linked to another amino acid residue of the sequence
  MISC_FEATURE (22)..(22): Xaa is isoleucine, leucine, valine, phenylalanine, methionine, or an amino acid residue which is covalently linked to another amino acid residue of the sequence
  MISC_FEATURE (23)..(23): Xaa is glycine, alanine, serine, or an amino acid residue which is covalently linked to another amino acid residue of the sequence
  MISC_FEATURE (24)..(24): Xaa is leucine, isoleucine, valine, phenylalanine, methionine, or an amino acid residue which is covalently linked to another amino acid residue of the sequence
  MISC_FEATURE (25)..(25): Xaa is methionine, valine, leucine, isoleucine, alanine, or an amino acid residue which is covalently linked to another amino acid residue of the sequence
  MISC_FEATURE (26)..(26): Xaa is valine, leucine, isoleucine, alanine, methionine, or an amino acid residue which is covalently linked to another amino acid residue of the sequence
  MISC_FEATURE (27)..(27): Xaa is glycine, alanine, serine, or an amino acid residue which is covalently linked to another amino acid residue of the sequence
  MISC_FEATURE (28)..(28): Xaa is glycine, alanine, serine, or an amino acid residue which is covalently linked to another amino acid residue of the sequence
  MISC_FEATURE (29)..(29): Xaa is valine, leucine, isoleucine, alanine, methionine, or an amino acid residue which is covalently linked to another amino acid residue of the sequence
EXXXXXXXXXXXDVGSNKXXXXXXXXXXX

SEQ ID NO: 468 - protein, 28 aa, Artificial Sequence
  synthetic
  MISC_FEATURE (1)..(1): Xaa is valine, leucine, isoleucine, alanine, methionine, or an amino acid residue which is covalently linked to another amino acid residue of the sequence
  MISC_FEATURE (2)..(2): Xaa is histidine, tyrosine, serine, methionine, or an amino acid residue which is covalently linked to another amino acid residue of the sequence
  MISC_FEATURE (3)..(3): Xaa is histidine, tyrosine, serine, methionine, or an amino acid residue which is covalently linked to another amino acid residue of the sequence
  MISC_FEATURE (4)..(4): Xaa is glutamine, asparagine, methionine, serine, or an amino acid which is covalently linked to another amino acid residue of the sequence
  MISC_FEATURE (5)..(5): Xaa is lysine, arginine, or an amino acid residue which is covalently linked to another amino acid residue of the sequence
  MISC_FEATURE (6)..(6): Xaa is leucine, isoleucine, valine, phenylalanine, methionine, or an amino acid residue which is covalently linked to another amino acid residue of the sequence
  MISC_FEATURE (7)..(7): Xaa is valine, leucine, isoleucine, alanine, methionine, or an amino acid residue which is covalently linked to another amino acid residue of the sequence
  MISC_FEATURE (8)..(8): Xaa is phenylalanine, tyrosine, valine, leucine, isoleucine, methionine, or an amino acid residue which is covalently linked to another amino acid residue of the sequence
  MISC_FEATURE (9)..(9): Xaa is phenylalanine, tyrosine, valine, leucine, isoleucine, methionine, or an amino acid residue which is covalently linked to another amino acid residue of the sequence
  MISC_FEATURE (10)..(10): Xaa is alanine, valine, glycine, serine, or an amino acid residue which is covalently linked to another amino acid residue of the sequence
  MISC_FEATURE (11)..(11): Xaa is glutamic acid, aspartic acid, or an amino acid residue which is covalently linked to another amino acid residue of the sequence
  MISC_FEATURE (18)..(18): Xaa is glycine, alanine, serine, or an amino acid residue which is covalently linked to another amino acid residue of the sequence
  MISC_FEATURE (19)..(19): Xaa is alanine, valine, glycine, serine, or an amino acid residue which is covalently linked to another amino acid residue of the sequence
  MISC_FEATURE (20)..(20): Xaa is isoleucine, leucine, valine, phenylalanine, methionine, or an amino acid residue which is covalently linked to another amino acid residue of the sequence
  MISC_FEATURE (21)..(21): Xaa is isoleucine, leucine, valine, phenylalanine, methionine, or an amino acid residue which is covalently linked to another amino acid residue of the sequence
  MISC_FEATURE (22)..(22): Xaa is glycine, alanine, serine, or an amino acid residue which is covalently linked to another amino acid residue of the sequence
  MISC_FEATURE (23)..(23): Xaa is leucine, isoleucine, valine, phenylalanine, methionine, or an amino acid residue which is covalently linked to another amino acid residue of the sequence
  MISC_FEATURE (24)..(24): Xaa is methionine, valine, leucine, isoleucine, alanine, or an amino acid residue which is covalently linked to another amino acid residue of the sequence
  MISC_FEATURE (25)..(25): Xaa is valine, leucine, isoleucine, alanine, methionine, or an amino acid residue which is covalently linked to another amino acid residue of the sequence
  MISC_FEATURE (26)..(26): Xaa is glycine, alanine, serine, or an amino acid residue which is covalently linked to another amino acid residue of the sequence
  MISC_FEATURE (27)..(27): Xaa is glycine, alanine, serine, or an amino acid residue which is covalently linked to another amino acid residue of the sequence
  MISC_FEATURE (28)..(28): Xaa is valine, leucine, isoleucine, alanine, methionine, or an amino acid residue which is covalently linked to another amino acid residue of the sequence
XXXXXXXXXXXDVGSNKXXXXXXXXXXX

SEQ ID NO: 469 - protein, 27 aa, Artificial Sequence
  synthetic
  MISC_FEATURE (1)..(1): Xaa is histidine, tyrosine, serine, methionine, or an amino acid residue which is covalently linked to another amino acid residue of the sequence
  MISC_FEATURE (2)..(2): Xaa is histidine, tyrosine, serine, methionine, or an amino acid residue which is covalently linked to another amino acid residue of the sequence
  MISC_FEATURE (3)..(3): Xaa is glutamine, asparagine, methionine, serine, or an amino acid which is covalently linked to another amino acid residue of the sequence
  MISC_FEATURE (4)..(4): Xaa is lysine, arginine, or an amino acid residue which is covalently linked to another amino acid residue of the sequence
  MISC_FEATURE (5)..(5): Xaa is leucine, isoleucine, valine, phenylalanine, methionine, or an amino acid residue which is covalently linked to another amino acid residue of the sequence
  MISC_FEATURE (6)..(6): Xaa is valine, leucine, isoleucine, alanine, methionine, or an amino acid residue which is covalently linked to another amino acid residue of the sequence
  MISC_FEATURE (7)..(7): Xaa is phenylalanine, tyrosine, valine, leucine, isoleucine, methionine, or an amino acid residue which is covalently linked to another amino acid residue of the sequence
  MISC_FEATURE (8)..(8): Xaa is phenylalanine, tyrosine, valine, leucine, isoleucine, methionine, or an amino acid residue which is covalently linked to another amino acid residue of the sequence
  MISC_FEATURE (9)..(9): Xaa is alanine, valine, glycine, serine, or an amino acid residue which is covalently linked to another amino acid residue of the sequence
  MISC_FEATURE (10)..(10): Xaa is glutamic acid, aspartic acid, or an amino acid residue which is covalently linked to another amino acid residue of the sequence
  MISC_FEATURE (17)..(17): Xaa is glycine, alanine, serine, or an amino acid residue which is covalently linked to another amino acid residue of the sequence
  MISC_FEATURE (18)..(18): Xaa is alanine, valine, glycine, serine, or an amino acid residue which is covalently linked to another amino acid residue of the sequence
  MISC_FEATURE (19)..(19): Xaa is isoleucine, leucine, valine, phenylalanine, methionine, or an amino acid residue which is covalently linked to another amino acid residue of the sequence
  MISC_FEATURE (20)..(20): Xaa is isoleucine, leucine, valine, phenylalanine, methionine, or an amino acid residue which is covalently linked to another amino acid residue of the sequence
  MISC_FEATURE (21)..(21): Xaa is glycine, alanine, serine, or an amino acid residue which is covalently linked to another amino acid residue of the sequence
  MISC_FEATURE (22)..(22): Xaa is leucine, isoleucine, valine, phenylalanine, methionine, or an amino acid residue which is covalently linked to another amino acid residue of the sequence
  MISC_FEATURE (23)..(23): Xaa is methionine, valine, leucine, isoleucine, alanine, or an amino acid residue which is covalently linked to another amino acid residue of the sequence
  MISC_FEATURE (24)..(24): Xaa is valine, leucine, isoleucine, alanine, methionine, or an amino acid residue which is covalently linked to another amino acid residue of the sequence
  MISC_FEATURE (25)..(25): Xaa is glycine, alanine, serine, or an amino acid residue which is covalently linked to another amino acid residue of the sequence
  MISC_FEATURE (26)..(26): Xaa is glycine, alanine, serine, or an amino acid residue which is covalently linked to another amino acid residue of the sequence
XXXXXXXXXXDVGSNKXXXXXXXXXXV

SEQ ID NO: 470 - protein, 26 aa, Artificial Sequence
  synthetic
  MISC_FEATURE (1)..(1): Xaa is histidine, tyrosine, serine, methionine, or an amino acid residue which is covalently linked to another amino acid residue of the sequence
  MISC_FEATURE (2)..(2): Xaa is glutamine, asparagine, methionine, serine, or an amino acid which is covalently linked to another amino acid residue of the sequence
  MISC_FEATURE (3)..(3): Xaa is lysine, arginine, or an amino acid residue which is covalently linked to another amino acid residue of the sequence
  MISC_FEATURE (4)..(4): Xaa is leucine, isoleucine, valine, phenylalanine, methionine, or an amino acid residue which is covalently linked to another amino acid residue of the sequence
  MISC_FEATURE (5)..(5): Xaa is valine, leucine, isoleucine, alanine, methionine, or an amino acid residue which is covalently linked to another amino acid residue of the sequence
  MISC_FEATURE (6)..(6): Xaa is phenylalanine, tyrosine, valine, leucine, isoleucine, methionine, or an amino acid residue which is covalently linked to another amino acid residue of the sequence
  MISC_FEATURE (7)..(7): Xaa is phenylalanine, tyrosine, valine, leucine, isoleucine, methionine, or an amino acid residue which is covalently linked to another amino acid residue of the sequence
  MISC_FEATURE (8)..(8): Xaa is alanine, valine, glycine, serine, or an amino acid residue which is covalently linked to another amino acid residue of the sequence
  MISC_FEATURE (9)..(9): Xaa is glutamic acid, aspartic acid, or an amino acid residue which is covalently linked to another amino acid residue of the sequence
  MISC_FEATURE (16)..(16): Xaa is glycine, alanine, serine, or an amino acid residue which is covalently linked to another amino acid residue of the sequence
  MISC_FEATURE (17)..(17): Xaa is alanine, valine, glycine, serine, or an amino acid residue which is covalently linked to another amino acid residue of the sequence
  MISC_FEATURE (18)..(18): Xaa is isoleucine, leucine, valine, phenylalanine, methionine, or an amino acid residue which is covalently linked to another amino acid residue of the sequence
  MISC_FEATURE (19)..(19): Xaa is isoleucine, leucine, valine, phenylalanine, methionine, or an amino acid residue which is covalently linked to another amino acid residue of the sequence
  MISC_FEATURE (20)..(20): Xaa is glycine, alanine, serine, or an amino acid residue which is covalently linked to another amino acid residue of the sequence
  MISC_FEATURE (21)..(21): Xaa is leucine, isoleucine, valine, phenylalanine, methionine, or an amino acid residue which is covalently linked to another amino acid residue of the sequence
  MISC_FEATURE (22)..(22): Xaa is methionine, valine, leucine, isoleucine, alanine, or an amino acid residue which is covalently linked to another amino acid residue of the sequence
  MISC_FEATURE (23)..(23): Xaa is valine, leucine, isoleucine, alanine, methionine, or an amino acid residue which is covalently linked to another amino acid residue of the sequence
  MISC_FEATURE (24)..(24): Xaa is glycine, alanine, serine, or an amino acid residue which is covalently linked to another amino acid residue of the sequence
XXXXXXXXXDVGSNKXXXXXXXXXGV

SEQ ID NO: 471 - protein, 25 aa, Artificial Sequence
  synthetic
  MISC_FEATURE (1)..(1): Xaa is glutamine, asparagine, methionine, serine, or an amino acid which is covalently linked to another amino acid residue of the sequence
  MISC_FEATURE (2)..(2): Xaa is lysine, arginine, or an amino acid residue which is covalently linked to another amino acid residue of the sequence
  MISC_FEATURE (3)..(3): Xaa is leucine, isoleucine, valine, phenylalanine, methionine, or an amino acid residue which is covalently linked to another amino acid residue of the sequence
  MISC_FEATURE (4)..(4): Xaa is valine, leucine, isoleucine, alanine, methionine, or an amino acid residue which is covalently linked to another amino acid residue of the sequence
  MISC_FEATURE (5)..(5): Xaa is phenylalanine, tyrosine, valine, leucine, isoleucine, methionine, or an amino acid residue which is covalently linked to another amino acid residue of the sequence
  MISC_FEATURE (6)..(6): Xaa is phenylalanine, tyrosine, valine, leucine, isoleucine, methionine, or an amino acid residue which is covalently linked to another amino acid residue of the sequence
  MISC_FEATURE (7)..(7): Xaa is alanine, valine, glycine, serine, or an amino acid residue which is covalently linked to another amino acid residue of the sequence
  MISC_FEATURE (8)..(8): Xaa is glutamic acid, aspartic acid, or an amino acid residue which is covalently linked to another amino acid residue of the sequence
  MISC_FEATURE (15)..(15): Xaa is glycine, alanine, serine, or an amino acid residue which is covalently linked to another amino acid residue of the sequence
  MISC_FEATURE (16)..(16): Xaa is alanine, valine, glycine, serine, or an amino acid residue which is covalently linked to another amino acid residue of the sequence
  MISC_FEATURE (17)..(17): Xaa is isoleucine, leucine, valine, phenylalanine, methionine, or an amino acid residue which is covalently linked to another amino acid residue of the sequence
  MISC_FEATURE (18)..(18): Xaa is isoleucine, leucine, valine, phenylalanine, methionine, or an amino acid residue which is covalently linked to another amino acid residue of the sequence
  MISC_FEATURE (19)..(19): Xaa is glycine, alanine, serine, or an amino acid residue which is covalently linked to another amino acid residue of the sequence
  MISC_FEATURE (20)..(20): Xaa is leucine, isoleucine, valine, phenylalanine, methionine, or an amino acid residue which is covalently linked to another amino acid residue of the sequence
  MISC_FEATURE (21)..(21): Xaa is methionine, valine, leucine, isoleucine, alanine, or an amino acid residue which is covalently linked to another amino acid residue of the sequence
  MISC_FEATURE (22)..(22): Xaa is valine, leucine, isoleucine, alanine, methionine, or an amino acid residue which is covalently linked to another amino acid residue of the sequence
XXXXXXXXDVGSNKXXXXXXXXGGV

SEQ ID NO: 472 - protein, 24 aa, Artificial Sequence
  synthetic
  MISC_FEATURE (1)..(1): Xaa is lysine, arginine, or an amino acid residue which is covalently linked to another amino acid residue of the sequence
  MISC_FEATURE (2)..(2): Xaa is leucine, isoleucine, valine, phenylalanine, methionine, or an amino acid residue which is covalently linked to another amino acid residue of the sequence
  MISC_FEATURE (3)..(3): Xaa is valine, leucine, isoleucine, alanine, methionine, or an amino acid residue which is covalently linked to another amino acid residue of the sequence
  MISC_FEATURE (4)..(4): Xaa is phenylalanine, tyrosine, valine, leucine, isoleucine, methionine, or an amino acid residue which is covalently linked to another amino acid residue of the sequence
  MISC_FEATURE (5)..(5): Xaa is phenylalanine, tyrosine, valine, leucine, isoleucine, methionine, or an amino acid residue which is covalently linked to another amino acid residue of the sequence
  MISC_FEATURE (6)..(6): Xaa is alanine, valine, glycine, serine, or an amino acid residue which is covalently linked to another amino acid residue of the sequence
  MISC_FEATURE (7)..(7): Xaa is glutamic acid, aspartic acid, or an amino acid residue which is covalently linked to another amino acid residue of the sequence
  MISC_FEATURE (14)..(14): Xaa is glycine, alanine, serine, or an amino acid residue which is covalently linked to another amino acid residue of the sequence
  MISC_FEATURE (15)..(15): Xaa is alanine, valine, glycine, serine, or an amino acid residue which is covalently linked to another amino acid residue of the sequence
  MISC_FEATURE (16)..(16): Xaa is isoleucine, leucine, valine, phenylalanine, methionine, or an amino acid residue which is covalently linked to another amino acid residue of the sequence
  MISC_FEATURE (17)..(17): Xaa is isoleucine, leucine, valine, phenylalanine, methionine, or an amino acid residue which is covalently linked to another amino acid residue of the sequence
  MISC_FEATURE (18)..(18): Xaa is glycine, alanine, serine, or an amino acid residue which is covalently linked to another amino acid residue of the sequence
  MISC_FEATURE (19)..(19): Xaa is leucine, isoleucine, valine, phenylalanine, methionine, or an amino acid residue which is covalently linked to another amino acid residue of the sequence
  MISC_FEATURE (20)..(20): Xaa is methionine, valine, leucine, isoleucine, alanine, or an amino acid residue which is covalently linked to another amino acid residue of the sequence
XXXXXXXDVGSNKXXXXXXXVGGV

SEQ ID NO: 473 - protein, 23 aa, Artificial Sequence
  synthetic
  MISC_FEATURE (1)..(1): Xaa is leucine, isoleucine, valine, phenylalanine, methionine, or an amino acid residue which is covalently linked to another amino acid residue of the sequence
  MISC_FEATURE (2)..(2): Xaa is valine, leucine, isoleucine, alanine, methionine, or an amino acid residue which is covalently linked to another amino acid residue of the sequence
  MISC_FEATURE (3)..(3): Xaa is phenylalanine, tyrosine, valine, leucine, isoleucine, methionine, or an amino acid residue which is covalently linked to another amino acid residue of the sequence
  MISC_FEATURE (4)..(4): Xaa is phenylalanine, tyrosine, valine, leucine, isoleucine, methionine, or an amino acid residue which is covalently linked to another amino acid residue of the sequence
  MISC_FEATURE (5)..(5): Xaa is alanine, valine, glycine, serine, or an amino acid residue which is covalently linked to another amino acid residue of the sequence
  MISC_FEATURE (6)..(6): Xaa is glutamic acid, aspartic acid, or an amino acid residue which is covalently linked to another amino acid residue of the sequence
  MISC_FEATURE (13)..(13): Xaa is glycine, alanine, serine, or an amino acid residue which is covalently linked to another amino acid residue of the sequence
  MISC_FEATURE (14)..(14): Xaa is alanine, valine, glycine, serine, or an amino acid residue which is covalently linked to another amino acid residue of the sequence
  MISC_FEATURE (15)..(15): Xaa is isoleucine, leucine, valine, phenylalanine, methionine, or an amino acid residue which is covalently linked to another amino acid residue of the sequence
  MISC_FEATURE (16)..(16): Xaa is isoleucine, leucine, valine, phenylalanine, methionine, or an amino acid residue which is covalently linked to another amino acid residue of the sequence
  MISC_FEATURE (17)..(17): Xaa is glycine, alanine, serine, or an amino acid residue which is covalently linked to another amino acid residue of the sequence
  MISC_FEATURE (18)..(18): Xaa is leucine, isoleucine, valine, phenylalanine, methionine, or an amino acid residue which is covalently linked to another amino acid residue of the sequence
XXXXXXDVGSNKXXXXXXMVGGV

SEQ ID NO: 474 - protein, 22 aa, Artificial Sequence
  synthetic
  MISC_FEATURE (1)..(1): Xaa is valine, leucine, isoleucine, alanine, methionine, or an amino acid residue which is covalently linked to another amino acid residue of the sequence
  MISC_FEATURE (2)..(2): Xaa is phenylalanine, tyrosine, valine, leucine, isoleucine, methionine, or an amino acid residue which is covalently linked to another amino acid residue of the sequence
  MISC_FEATURE (3)..(3): Xaa is phenylalanine, tyrosine, valine, leucine, isoleucine, methionine, or an amino acid residue which is covalently linked to another amino acid residue of the sequence
  MISC_FEATURE (4)..(4): Xaa is alanine, valine, glycine, serine, or an amino acid residue which is covalently linked to another amino acid residue of the sequence
  MISC_FEATURE (5)..(5): Xaa is glutamic acid, aspartic acid, or an amino acid residue which is covalently linked to another amino acid residue of the sequence
  MISC_FEATURE (12)..(12): Xaa is glycine, alanine, serine, or an amino acid residue which is covalently linked to another amino acid residue of the sequence
  MISC_FEATURE (13)..(13): Xaa is alanine, valine, glycine, serine, or an amino acid residue which is covalently linked to another amino acid residue of the sequence
  MISC_FEATURE (14)..(14): Xaa is isoleucine, leucine, valine, phenylalanine, methionine, or an amino acid residue which is covalently linked to another amino acid residue of the sequence
  MISC_FEATURE (15)..(15): Xaa is isoleucine, leucine, valine, phenylalanine, methionine, or an amino acid residue which is covalently linked to another amino acid residue of the sequence
  MISC_FEATURE (16)..(16): Xaa is glycine, alanine, serine, or an amino acid residue which is covalently linked to another amino acid residue of the sequence
XXXXXDVGSNKXXXXXLMVGGV

SEQ ID NO: 475 - protein, 21 aa, Artificial Sequence
  synthetic
  MISC_FEATURE (1)..(1): Xaa is phenylalanine, tyrosine, valine, leucine, isoleucine, methionine, or an amino acid residue which is covalently linked to another amino acid residue of the sequence
  MISC_FEATURE (2)..(2): Xaa is phenylalanine, tyrosine, valine, leucine, isoleucine, methionine, or an amino acid residue which is covalently linked to another amino acid residue of the sequence
  MISC_FEATURE (3)..(3): Xaa is alanine, valine, glycine, serine, or an amino acid residue which is covalently linked to another amino acid residue of the sequence
  MISC_FEATURE (4)..(4): Xaa is glutamic acid, aspartic acid, or an amino acid residue which is covalently linked to another amino acid residue of the sequence
  MISC_FEATURE (11)..(11): Xaa is glycine, alanine, serine, or an amino acid residue which is covalently linked to another amino acid residue of the sequence
  MISC_FEATURE (12)..(12): Xaa is alanine, valine, glycine, serine, or an amino acid residue which is covalently linked to another amino acid residue of the sequence
  MISC_FEATURE (13)..(13): Xaa is isoleucine, leucine, valine, phenylalanine, methionine, or an amino acid residue which is covalently linked to another amino acid residue of the sequence
  MISC_FEATURE (14)..(14): Xaa is isoleucine, leucine, valine, phenylalanine, methionine, or an amino acid residue which is covalently linked to another amino acid residue of the sequence
XXXXDVGSNKXXXXGLMVGGV

SEQ ID NO: 476 - protein, 20 aa, Artificial Sequence
  synthetic
  MISC_FEATURE (1)..(1): Xaa is phenylalanine, tyrosine, valine, leucine, isoleucine, methionine, or an amino acid residue which is covalently linked to another amino acid residue of the sequence
  MISC_FEATURE (2)..(2): Xaa is alanine, valine, glycine, serine, or an amino acid residue which is covalently linked to another amino acid residue of the sequence
  MISC_FEATURE (3)..(3): Xaa is glutamic acid, aspartic acid, or an amino acid residue which is covalently linked to another amino acid residue of the sequence
  MISC_FEATURE (10)..(10): Xaa is glycine, alanine, serine, or an amino acid residue which is covalently linked to another amino acid residue of the sequence
  MISC_FEATURE (11)..(11): Xaa is alanine, valine, glycine, serine, or an amino acid residue which is covalently linked to another amino acid residue of the sequence
  MISC_FEATURE (12)..(12): Xaa is isoleucine, leucine, valine, phenylalanine, methionine, or an amino acid residue which is covalently linked to another amino acid residue of the sequence
XXXDVGSNKXXXIGLMVGGV

SEQ ID NO: 477 - protein, 19 aa, Artificial Sequence
  synthetic
  MISC_FEATURE (1)..(1): Xaa is alanine, valine, glycine, serine, or an amino acid residue which is covalently linked to another amino acid residue of the sequence
  MISC_FEATURE (2)..(2): Xaa is glutamic acid, aspartic acid, or an amino acid residue which is covalently linked to another amino acid residue of the sequence
  MISC_FEATURE (9)..(9): Xaa is glycine, alanine, serine, or an amino acid residue which is covalently linked to another amino acid residue of the sequence
  MISC_FEATURE (10)..(10): Xaa is alanine, valine, glycine, serine, or an amino acid residue which is covalently linked to another amino acid residue of the sequence
XXDVGSNKXXIIGLMVGGV

SEQ ID NO: 478 - protein, 18 aa, Artificial Sequence
  synthetic
  MISC_FEATURE (1)..(1): Xaa is glutamic acid, aspartic acid, or an amino acid residue which is covalently linked to another amino acid residue of the sequence
  MISC_FEATURE (8)..(8): Xaa is glycine, alanine, serine, or an amino acid residue which is covalently linked to another amino acid residue of the sequence
XDVGSNKXAIIGLMVGGV

SEQ ID NO: 479 - protein, 38 aa, Artificial Sequence
  synthetic
  MISC_FEATURE (13)..(13): Xaa is histidine, tyrosine, serine, methionine, or an amino acid residue which is covalently linked to another amino acid residue of the sequence
  MISC_FEATURE (14)..(14): Xaa is histidine, tyrosine, serine, methionine, or an amino acid residue which is covalently linked to another amino acid residue of the sequence
  MISC_FEATURE (15)..(15): Xaa is glutamine, asparagine, methionine, serine, or an amino acid which is covalently linked to another amino acid residue of the sequence
  MISC_FEATURE (16)..(16): Xaa is lysine, arginine, or an amino acid residue which is covalently linked to another amino acid residue of the sequence
  MISC_FEATURE (17)..(17): Xaa is leucine, isoleucine, valine, phenylalanine, methionine, or an amino acid residue which is covalently linked to another amino acid residue of the sequence
  MISC_FEATURE (18)..(18): Xaa is valine, leucine, isoleucine, alanine, methionine, or an amino acid residue which is covalently linked to another amino acid residue of the sequence
  MISC_FEATURE (19)..(19): Xaa is phenylalanine, tyrosine, valine, leucine, isoleucine, methionine, or an amino acid residue which is covalently linked to another amino acid residue of the sequence
  MISC_FEATURE (20)..(20): Xaa is phenylalanine, tyrosine, valine, leucine, isoleucine, methionine, or an amino acid residue which is covalently linked to another amino acid residue of the sequence
  MISC_FEATURE (21)..(21): Xaa is alanine, valine, glycine, serine, or an amino acid residue which is covalently linked to another amino acid residue of the sequence
  MISC_FEATURE (22)..(22): Xaa is glutamic acid, aspartic acid, or an amino acid residue which is covalently linked to another amino acid residue of the sequence
  MISC_FEATURE (29)..(29): Xaa is glycine, alanine, serine, or an amino acid residue which is covalently linked to another amino acid residue of the sequence
  MISC_FEATURE (30)..(30): Xaa is alanine, valine, glycine, serine, or an amino acid residue which is covalently linked to another amino acid residue of the sequence
  MISC_FEATURE (31)..(31): Xaa is isoleucine, leucine, valine, phenylalanine, methionine, or an amino acid residue which is covalently linked to another amino acid residue of the sequence
  MISC_FEATURE (32)..(32): Xaa is isoleucine, leucine, valine, phenylalanine, methionine, or an amino acid residue which is covalently linked to another amino acid residue of the sequence
  MISC_FEATURE (33)..(33): Xaa is glycine, alanine, serine, or an amino acid residue which is covalently linked to another amino acid residue of the sequence
  MISC_FEATURE (34)..(34): Xaa is leucine, isoleucine, valine, phenylalanine, methionine, or an amino acid residue which is covalently linked to another amino acid residue of the sequence
  MISC_FEATURE (35)..(35): Xaa is methionine, valine, leucine, isoleucine, alanine, or an amino acid residue which is covalently linked to another amino acid residue of the sequence
  MISC_FEATURE (36)..(36): Xaa is valine, leucine, isoleucine, alanine, methionine, or an amino acid residue which is covalently linked to another amino acid residue of the sequence
  MISC_FEATURE (37)..(37): Xaa is glycine, alanine, serine, or an amino acid residue which is covalently linked to another amino acid residue of the sequence
  MISC_FEATURE (38)..(38): Xaa is glycine, alanine, serine, or an amino acid residue which is covalently linked to another amino acid residue of the sequence
DAEFRHDSGYEVXXXXXXXXXXDVGSNKXXXXXXXXXX

SEQ ID NO: 480 - protein, 37 aa, Artificial Sequence
  synthetic
  MISC_FEATURE (12)..(12): Xaa is histidine, tyrosine, serine, methionine, or an amino acid residue which is covalently linked to another amino acid residue of the sequence
  MISC_FEATURE (13)..(13): Xaa is histidine, tyrosine, serine, methionine, or an amino acid residue which is covalently linked to another amino acid residue of the sequence
  MISC_FEATURE (14)..(14): Xaa is glutamine, asparagine, methionine, serine, or an amino acid which is covalently linked to another amino acid residue of the sequence
  MISC_FEATURE (15)..(15): Xaa is lysine, arginine, or an amino acid residue which is covalently linked to another amino acid residue of the sequence
  MISC_FEATURE (16)..(16): Xaa is leucine, isoleucine, valine, phenylalanine, methionine, or an amino acid residue which is covalently linked to another amino acid residue of the sequence
  MISC_FEATURE (17)..(17): Xaa is valine, leucine, isoleucine, alanine, methionine, or an amino acid residue which is covalently linked to another amino acid residue of the sequence
  MISC_FEATURE (18)..(18): Xaa is phenylalanine, tyrosine, valine, leucine, isoleucine, methionine, or an amino acid residue which is covalently linked to another amino acid residue of the sequence
  MISC_FEATURE (19)..(19): Xaa is phenylalanine, tyrosine, valine, leucine, isoleucine, methionine, or an amino acid residue which is covalently linked to another amino acid residue of the sequence
  MISC_FEATURE (20)..(20): Xaa is alanine, valine, glycine, serine, or an amino acid residue which is covalently linked to another amino acid residue of the sequence
  MISC_FEATURE (21)..(21): Xaa is glutamic acid, aspartic acid, or an amino acid residue which is covalently linked to another amino acid residue of the sequence
  MISC_FEATURE (28)..(28): Xaa is glycine, alanine, serine, or an amino acid residue which is covalently linked to another amino acid residue of the sequence
  MISC_FEATURE (29)..(29): Xaa is alanine, valine, glycine, serine, or an amino acid residue which is covalently linked to another amino acid residue of the sequence
  MISC_FEATURE (30)..(30): Xaa is isoleucine, leucine, valine, phenylalanine, methionine, or an amino acid residue which is covalently linked to another amino acid residue of the sequence
  MISC_FEATURE (31)..(31): Xaa is isoleucine, leucine, valine, phenylalanine, methionine, or an amino acid residue which is covalently linked to another amino acid residue of the sequence
  MISC_FEATURE (32)..(32): Xaa is glycine, alanine, serine, or an amino acid residue which is covalently linked to another amino acid residue of the sequence
  MISC_FEATURE (33)..(33): Xaa is leucine, isoleucine, valine, phenylalanine, methionine, or an amino acid residue which is covalently linked to another amino acid residue of the sequence
  MISC_FEATURE (34)..(34): Xaa is methionine, valine, leucine, isoleucine, alanine, or an amino acid residue which is covalently linked to another amino acid residue of the sequence
  MISC_FEATURE (35)..(35): Xaa is valine, leucine, isoleucine, alanine, methionine, or an amino acid residue which is covalently linked to another amino acid residue of the sequence
  MISC_FEATURE (36)..(36): Xaa is glycine, alanine, serine, or an amino acid residue which is covalently linked to another amino acid residue of the sequence
  MISC_FEATURE (37)..(37): Xaa is glycine, alanine, serine, or an amino acid residue which is covalently linked to another amino acid residue of the sequence
AEFRHDSGYEVXXXXXXXXXXDVGSNKXXXXXXXXXX

SEQ ID NO: 481 - protein, 36 aa, Artificial Sequence
  synthetic
  MISC_FEATURE (11)..(11): Xaa is histidine, tyrosine, serine, methionine, or an amino acid residue which is covalently linked to another amino acid residue of the sequence
  MISC_FEATURE (12)..(12): Xaa is histidine, tyrosine, serine, methionine, or an amino acid residue which is covalently linked to another amino acid residue of the sequence
  MISC_FEATURE (13)..(13): Xaa is glutamine, asparagine, methionine, serine, or an amino acid which is covalently linked to another amino acid residue of the sequence
  MISC_FEATURE (14)..(14): Xaa is lysine, arginine, or an amino acid residue which is covalently linked to another amino acid residue of the sequence
  MISC_FEATURE (15)..(15): Xaa is leucine, isoleucine, valine, phenylalanine, methionine, or an amino acid residue which is covalently linked to another amino acid residue of the sequence
  MISC_FEATURE (16)..(16): Xaa is valine, leucine, isoleucine, alanine, methionine, or an amino acid residue which is covalently linked to another amino acid residue of the sequence
  MISC_FEATURE (17)..(17): Xaa is phenylalanine, tyrosine, valine, leucine, isoleucine, methionine, or an amino acid residue which is covalently linked to another amino acid residue of the sequence
  MISC_FEATURE (18)..(18): Xaa is phenylalanine, tyrosine, valine, leucine, isoleucine, methionine, or an amino acid residue which is covalently linked to another amino acid residue of the sequence
  MISC_FEATURE (19)..(19): Xaa is alanine, valine, glycine, serine, or an amino acid residue which is covalently linked to another amino acid residue of the sequence
  MISC_FEATURE (20)..(20): Xaa is glutamic acid, aspartic acid, or an amino acid residue which is covalently linked to another amino acid residue of the sequence
  MISC_FEATURE (27)..(27): Xaa is glycine, alanine, serine, or an amino acid residue which is covalently linked to another amino acid residue of the sequence
  MISC_FEATURE (28)..(28): Xaa is alanine, valine, glycine, serine, or an amino acid residue which is covalently linked to another amino acid residue of the sequence
  MISC_FEATURE (29)..(29): Xaa is isoleucine, leucine, valine, phenylalanine, methionine, or an amino acid residue which is covalently linked to another amino acid residue of the sequence
  MISC_FEATURE (30)..(30): Xaa is isoleucine, leucine, valine, phenylalanine, methionine, or an amino acid residue which is covalently linked to another amino acid residue of the sequence
  MISC_FEATURE (31)..(31): Xaa is glycine, alanine, serine, or an amino acid residue which is covalently linked to another amino acid residue of the sequence
  MISC_FEATURE (32)..(32): Xaa is leucine, isoleucine, valine, phenylalanine, methionine, or an amino acid residue which is covalently linked to another amino acid residue of the sequence
  MISC_FEATURE (33)..(33): Xaa is methionine, valine, leucine, isoleucine, alanine, or an amino acid residue which is covalently linked to another amino acid residue of the sequence
  MISC_FEATURE (34)..(34): Xaa is valine, leucine, isoleucine, alanine, methionine, or an amino acid residue which is covalently linked to another amino acid residue of the sequence
  MISC_FEATURE (35)..(35): Xaa is glycine, alanine, serine, or an amino acid residue which is covalently linked to another amino acid residue of the sequence
  MISC_FEATURE (36)..(36): Xaa is glycine, alanine, serine, or an amino acid residue which is covalently linked to another amino acid residue of the sequence
EFRHDSGYEVXXXXXXXXXXDVGSNKXXXXXXXXXX

SEQ ID NO: 482 - protein, 35 aa, Artificial Sequence
  synthetic
  MISC_FEATURE (10)..(10): Xaa is histidine, tyrosine, serine, methionine, or an amino acid residue which is covalently linked to another amino acid residue of the sequence
  MISC_FEATURE (11)..(11): Xaa is histidine, tyrosine, serine, methionine, or an amino acid residue which is covalently linked to another amino acid residue of the sequence
  MISC_FEATURE (12)..(12): Xaa is glutamine, asparagine, methionine, serine, or an amino acid which is covalently linked to another amino acid residue of the sequence
  MISC_FEATURE (13)..(13): Xaa is lysine, arginine, or an amino acid residue which is covalently linked to another amino acid residue of the sequence
  MISC_FEATURE (14)..(14): Xaa is leucine, isoleucine, valine, phenylalanine, methionine, or an amino acid residue which is covalently linked to another amino acid residue of the sequence
  MISC_FEATURE (15)..(15): Xaa is valine, leucine, isoleucine, alanine, methionine, or an amino acid residue which is covalently linked to another amino acid residue of the sequence
  MISC_FEATURE (16)..(16): Xaa is phenylalanine, tyrosine, valine, leucine, isoleucine, methionine, or an amino acid residue which is covalently linked to another amino acid residue of the sequence
  MISC_FEATURE (17)..(17): Xaa is phenylalanine, tyrosine, valine, leucine, isoleucine, methionine, or an amino acid residue which is covalently linked to another amino acid residue of the sequence
  MISC_FEATURE (18)..(18): Xaa is alanine, valine, glycine, serine, or an amino acid residue which is covalently linked to another amino acid residue of the sequence
  MISC_FEATURE (19)..(19): Xaa is glutamic acid, aspartic acid, or an amino acid residue which is covalently linked to another amino acid residue of the sequence
  MISC_FEATURE (26)..(26): Xaa is glycine, alanine, serine, or an amino acid residue which is covalently linked to another amino acid residue of the sequence
  MISC_FEATURE (27)..(27): Xaa is alanine, valine, glycine, serine, or an amino acid residue which is covalently linked to another amino acid residue of the sequence
  MISC_FEATURE (28)..(28): Xaa is isoleucine, leucine, valine, phenylalanine, methionine, or an amino acid residue which is covalently linked to another amino acid residue of the sequence
  MISC_FEATURE (29)..(29): Xaa is isoleucine, leucine, valine, phenylalanine, methionine, or an amino acid residue which is covalently linked to another amino acid residue of the sequence
  MISC_FEATURE (30)..(30): Xaa is glycine, alanine, serine, or an amino acid residue which is covalently linked to another amino acid residue of the sequence
  MISC_FEATURE (31)..(31): Xaa is leucine, isoleucine, valine, phenylalanine, methionine, or an amino acid residue which is covalently linked to another amino acid residue of the sequence
  MISC_FEATURE (32)..(32): Xaa is methionine, valine, leucine, isoleucine, alanine, or an amino acid residue which is covalently linked to another amino acid residue of the sequence
  MISC_FEATURE (33)..(33): Xaa is valine, leucine, isoleucine, alanine, methionine, or an amino acid residue which is covalently linked to another amino acid residue of the sequence
  MISC_FEATURE (34)..(34): Xaa is glycine, alanine, serine, or an amino acid residue which is covalently linked to another amino acid residue of the sequence
  MISC_FEATURE (35)..(35): Xaa is glycine, alanine, serine, or an amino acid residue which is covalently linked to another amino acid residue of the sequence
FRHDSGYEVXXXXXXXXXXDVGSNKXXXXXXXXXX

SEQ ID NO: 483 - protein, 34 aa, Artificial Sequence
  synthetic
  MISC_FEATURE (9)..(9): Xaa is histidine, tyrosine, serine, methionine, or an amino acid residue which is covalently linked to another amino acid residue of the sequence
  MISC_FEATURE (10)..(10): Xaa is histidine, tyrosine, serine, methionine, or an amino acid residue which is covalently linked to another amino acid residue of the sequence
  MISC_FEATURE (11)..(11): Xaa is glutamine, asparagine, methionine, serine, or an amino acid which is covalently linked to another amino acid residue of the sequence
  MISC_FEATURE (12)..(12): Xaa is lysine, arginine, or an amino acid residue which is covalently linked to another amino acid residue of the sequence
  MISC_FEATURE (13)..(13): Xaa is leucine, isoleucine, valine, phenylalanine, methionine, or an amino acid residue which is covalently linked to another amino acid residue of the sequence
  MISC_FEATURE (14)..(14): Xaa is valine, leucine, isoleucine, alanine, methionine, or an amino acid residue which is covalently linked to another amino acid residue of the sequence
  MISC_FEATURE (15)..(15): Xaa is phenylalanine, tyrosine, valine, leucine, isoleucine, methionine, or an amino acid residue which is covalently linked to another amino acid residue of the sequence
  MISC_FEATURE (16)..(16): Xaa is phenylalanine, tyrosine, valine, leucine, isoleucine, methionine, or an amino acid residue which is covalently linked to another amino acid residue of the sequence
  MISC_FEATURE (17)..(17): Xaa is alanine, valine, glycine, serine, or an amino acid residue which is covalently linked to another amino acid residue of the sequence
  MISC_FEATURE (18)..(18): Xaa is glutamic acid, aspartic acid, or an amino acid residue which is covalently linked to another amino acid residue of the sequence
  MISC_FEATURE (25)..(25): Xaa is glycine, alanine, serine, or an amino acid residue which is covalently linked to another amino acid residue of the sequence
  MISC_FEATURE (26)..(26): Xaa is alanine, valine, glycine, serine, or an amino acid residue which is covalently linked to another amino acid residue of the sequence
  MISC_FEATURE (27)..(27): Xaa is isoleucine, leucine, valine, phenylalanine, methionine, or an amino acid residue which is covalently linked to another amino acid residue of the sequence
  MISC_FEATURE (28)..(28): Xaa is isoleucine, leucine, valine, phenylalanine, methionine, or an amino acid residue which is covalently linked to another amino acid residue of the sequence
  MISC_FEATURE (29)..(29): Xaa is glycine, alanine, serine, or an amino acid residue which is covalently linked to another amino acid residue of the sequence
  MISC_FEATURE (30)..(30): Xaa is leucine, isoleucine, valine, phenylalanine, methionine, or an amino acid residue which is covalently linked to another amino acid residue of the sequence
  MISC_FEATURE (31)..(31): Xaa is methionine, valine, leucine, isoleucine, alanine, or an amino acid residue which is covalently linked to another amino acid residue of the sequence
  MISC_FEATURE (32)..(32): Xaa is valine, leucine, isoleucine, alanine, methionine, or an amino acid residue which is covalently linked to another amino acid residue of the sequence
  MISC_FEATURE (33)..(33): Xaa is glycine, alanine, serine, or an amino acid residue which is covalently linked to another amino acid residue of the sequence
  MISC_FEATURE (34)..(34): Xaa is glycine, alanine, serine, or an amino acid residue which is covalently linked to another amino acid residue of the sequence
RHDSGYEVXXXXXXXXXXDVGSNKXXXXXXXXXX

SEQ ID NO: 484 - protein, 33 aa, Artificial Sequence
  synthetic
  MISC_FEATURE (8)..(8): Xaa is histidine, tyrosine, serine, methionine, or an amino acid residue which is covalently linked to another amino acid residue of the sequence
  MISC_FEATURE (9)..(9): Xaa is histidine, tyrosine, serine, methionine, or an amino acid residue which is covalently linked to another amino acid residue of the sequence
  MISC_FEATURE (10)..(10): Xaa is glutamine, asparagine, methionine, serine, or an amino acid which is covalently linked to another amino acid residue of the sequence
  MISC_FEATURE (11)..(11): Xaa is lysine, arginine, or an amino acid residue which is covalently linked to another amino acid residue of the sequence
  MISC_FEATURE (12)..(12): Xaa is leucine, isoleucine, valine, phenylalanine, methionine, or an amino acid residue which is covalently linked to another amino acid residue of the sequence
  MISC_FEATURE (13)..(13): Xaa is valine, leucine, isoleucine, alanine, methionine, or an amino acid residue which is covalently linked to another amino acid residue of the sequence
  MISC_FEATURE (14)..(14): Xaa is phenylalanine, tyrosine, valine, leucine, isoleucine, methionine, or an amino acid residue which is covalently linked to another amino acid residue of the sequence
  MISC_FEATURE (15)..(15): Xaa is phenylalanine, tyrosine, valine, leucine, isoleucine, methionine, or an amino acid residue which is covalently linked to another amino acid residue of the sequence
  MISC_FEATURE (16)..(16): Xaa is alanine, valine, glycine, serine, or an amino acid residue which is covalently linked to another amino acid residue of the sequence
  MISC_FEATURE (17)..(17): Xaa is glutamic acid, aspartic acid, or an amino acid residue which is covalently linked to another amino acid residue of the sequence
  MISC_FEATURE (24)..(24): Xaa is glycine, alanine, serine, or an amino acid residue which is covalently linked to another amino acid residue of the sequence
  MISC_FEATURE (25)..(25): Xaa is alanine, valine, glycine, serine, or an amino acid residue which is covalently linked to another amino acid residue of the sequence
  MISC_FEATURE (26)..(26): Xaa is isoleucine, leucine, valine, phenylalanine, methionine, or an amino acid residue which is covalently linked to another amino acid residue of the sequence
  MISC_FEATURE (27)..(27): Xaa is isoleucine, leucine, valine, phenylalanine, methionine, or an amino acid residue which is covalently linked to another amino acid residue of the sequence
  MISC_FEATURE (28)..(28): Xaa is glycine, alanine, serine, or an amino acid residue which is covalently linked to another amino acid residue of the sequence
  MISC_FEATURE (29)..(29): Xaa is leucine, isoleucine, valine, phenylalanine, methionine, or an amino acid residue which is covalently linked to another amino acid residue of the sequence
  MISC_FEATURE (30)..(30): Xaa is methionine, valine, leucine, isoleucine, alanine, or an amino acid residue which is covalently linked to another amino acid residue of the sequence
  MISC_FEATURE (31)..(31): Xaa is valine, leucine, isoleucine, alanine, methionine, or an amino acid residue which is covalently linked to another amino acid residue of the sequence
  MISC_FEATURE (32)..(32): Xaa is glycine, alanine, serine, or an amino acid residue which is covalently linked to another amino acid residue of the sequence
  MISC_FEATURE (33)..(33): Xaa is glycine, alanine, serine, or an amino acid residue which is covalently linked to another amino acid residue of the sequence
HDSGYEVXXXXXXXXXXDVGSNKXXXXXXXXXX

SEQ ID NO: 485 - protein, 32 aa, Artificial Sequence
  synthetic
  MISC_FEATURE (7)..(7): Xaa is histidine, tyrosine, serine, methionine, or an amino acid residue which is covalently linked to another amino acid residue of the sequence
  MISC_FEATURE (8)..(8): Xaa is histidine, tyrosine, serine, methionine, or an amino acid residue which is covalently linked to another amino acid residue of the sequence
  MISC_FEATURE (9)..(9): Xaa is glutamine, asparagine, methionine, serine, or an amino acid which is covalently linked to another amino acid residue of the sequence
  MISC_FEATURE (10)..(10): Xaa is lysine, arginine, or an amino acid residue which is covalently linked to another amino acid residue of the sequence
  MISC_FEATURE (11)..(11): Xaa is leucine, isoleucine, valine, phenylalanine, methionine, or an amino acid residue which is covalently linked to another amino acid residue of the sequence
  MISC_FEATURE (12)..(12): Xaa is valine, leucine, isoleucine, alanine, methionine, or an amino acid residue which is covalently linked to another amino acid residue of the sequence
  MISC_FEATURE (13)..(13): Xaa is phenylalanine, tyrosine, valine, leucine, isoleucine, methionine, or an amino acid residue which is covalently linked to another amino acid residue of the sequence
  MISC_FEATURE (14)..(14): Xaa is phenylalanine, tyrosine, valine, leucine, isoleucine, methionine, or an amino acid residue which is covalently linked to another amino acid residue of the sequence
  MISC_FEATURE (15)..(15): Xaa is alanine, valine, glycine, serine, or an amino acid residue which is covalently linked to another amino acid residue of the sequence
  MISC_FEATURE (16)..(16): Xaa is glutamic acid, aspartic acid, or an amino acid residue which is covalently linked to another amino acid residue of the sequence
  MISC_FEATURE (23)..(23): Xaa is glycine, alanine, serine, or an amino acid residue which is covalently linked to another amino acid residue of the sequence
  MISC_FEATURE (24)..(24): Xaa is alanine, valine, glycine, serine, or an amino acid residue which is covalently linked to another amino acid residue of the sequence
  MISC_FEATURE (25)..(25): Xaa is isoleucine, leucine, valine, phenylalanine, methionine, or an amino acid residue which is covalently linked to another amino acid residue of the sequence
  MISC_FEATURE (26)..(26): Xaa is isoleucine, leucine, valine, phenylalanine, methionine, or an amino acid residue which is covalently linked to another amino acid residue of the sequence
  MISC_FEATURE (27)..(27): Xaa is glycine, alanine, serine, or an amino acid residue which is covalently linked to another amino acid residue of the sequence
  MISC_FEATURE (28)..(28): Xaa is leucine, isoleucine, valine, phenylalanine, methionine, or an amino acid residue which is covalently linked to another amino acid residue of the sequence
  MISC_FEATURE (29)..(29): Xaa is methionine, valine, leucine, isoleucine, alanine, or an amino acid residue which is covalently linked to another amino acid residue of the sequence
  MISC_FEATURE (30)..(30): Xaa is valine, leucine, isoleucine, alanine, methionine, or an amino acid residue which is covalently linked to another amino acid residue of the sequence
  MISC_FEATURE (31)..(31): Xaa is glycine, alanine, serine, or an amino acid residue which is covalently linked to another amino acid residue of the sequence
  MISC_FEATURE (32)..(32): Xaa is glycine, alanine, serine, or an amino acid residue which is covalently linked to another amino acid residue of the sequence
DSGYEVXXXXXXXXXXDVGSNKXXXXXXXXXX

SEQ ID NO: 486 - protein, 31 aa, Artificial Sequence
  synthetic
  MISC_FEATURE (6)..(6): Xaa is histidine, tyrosine, serine, methionine, or an amino acid residue which is covalently linked to another amino acid residue of the sequence
  MISC_FEATURE (7)..(7): Xaa is histidine, tyrosine, serine, methionine, or an amino acid residue which is covalently linked to another amino acid residue of the sequence
  MISC_FEATURE (8)..(8): Xaa is glutamine, asparagine, methionine, serine, or an amino acid which is covalently linked to another amino acid residue of the sequence
  MISC_FEATURE (9)..(9): Xaa is lysine, arginine, or an amino acid residue which is covalently linked to another amino acid residue of the sequence
  MISC_FEATURE (10)..(10): Xaa is leucine, isoleucine, valine, phenylalanine, methionine, or an amino acid residue which is covalently linked to another amino acid residue of the sequence
  MISC_FEATURE (11)..(11): Xaa is valine, leucine, isoleucine, alanine, methionine, or an amino acid residue which is covalently linked to another amino acid residue of the sequence
  MISC_FEATURE (12)..(12): Xaa is phenylalanine, tyrosine, valine, leucine, isoleucine, methionine, or an amino acid residue which is covalently linked to another amino acid residue of the sequence
  MISC_FEATURE (13)..(13): Xaa is phenylalanine, tyrosine, valine, leucine, isoleucine, methionine, or an amino acid residue which is covalently linked to another amino acid residue of the sequence
  MISC_FEATURE (14)..(14): Xaa is alanine, valine, glycine, serine, or an amino acid residue which is covalently linked to another amino acid residue of the sequence
  MISC_FEATURE (15)..(15): Xaa is glutamic acid, aspartic acid, or an amino acid residue which is covalently linked to another amino acid residue of the sequence
  MISC_FEATURE (22)..(22): Xaa is glycine, alanine, serine, or an amino acid residue which is covalently linked to another amino acid residue of the sequence
  MISC_FEATURE (23)..(23): Xaa is alanine, valine, glycine, serine, or an amino acid residue which is covalently linked to another amino acid residue of the sequence
  MISC_FEATURE (24)..(24): Xaa is isoleucine, leucine, valine, phenylalanine, methionine, or an amino acid residue which is covalently linked to another amino acid residue of the sequence
  MISC_FEATURE (25)..(25): Xaa is isoleucine, leucine, valine, phenylalanine, methionine, or an amino acid residue which is covalently linked to another amino acid residue of the sequence
  MISC_FEATURE (26)..(26): Xaa is glycine, alanine, serine, or an amino acid residue which is covalently linked to another amino acid residue of the sequence
  MISC_FEATURE (27)..(27): Xaa is leucine, isoleucine, valine, phenylalanine, methionine, or an amino acid residue which is covalently linked to another amino acid residue of the sequence
  MISC_FEATURE (28)..(28): Xaa is methionine, valine, leucine, isoleucine, alanine, or an amino acid residue which is covalently linked to another amino acid residue of the sequence
  MISC_FEATURE (29)..(29): Xaa is valine, leucine, isoleucine, alanine, methionine, or an amino acid residue which is covalently linked to another amino acid residue of the sequence
  MISC_FEATURE (30)..(30): Xaa is glycine, alanine, serine, or an amino acid residue which is covalently linked to another amino acid residue of the sequence
  MISC_FEATURE (31)..(31): Xaa is glycine, alanine, serine, or an amino acid residue which is covalently linked to another amino acid residue of the sequence
SGYEVXXXXXXXXXXDVGSNKXXXXXXXXXX

SEQ ID NO: 487 - protein, 30 aa, Artificial Sequence
  synthetic
  MISC_FEATURE (5)..(5): Xaa is histidine, tyrosine, serine, methionine, or an amino acid residue which is covalently linked to another amino acid residue of the sequence
  MISC_FEATURE (6)..(6): Xaa is histidine, tyrosine, serine, methionine, or an amino acid residue which is covalently linked to another amino acid residue of the sequence
  MISC_FEATURE (7)..(7): Xaa is glutamine, asparagine, methionine, serine, or an amino acid which is covalently linked to another amino acid residue of the sequence
  MISC_FEATURE (8)..(8): Xaa is lysine, arginine, or an amino acid residue which is covalently linked to another amino acid residue of the sequence
  MISC_FEATURE (9)..(9): Xaa is leucine, isoleucine, valine, phenylalanine, methionine, or an amino acid residue which is covalently linked to another amino acid residue of the sequence
  MISC_FEATURE (10)..(10): Xaa is valine, leucine, isoleucine, alanine, methionine, or an amino acid residue which is covalently linked to another amino acid residue of the sequence
  MISC_FEATURE (11)..(11): Xaa is phenylalanine, tyrosine, valine, leucine, isoleucine, methionine, or an amino acid residue which is covalently linked to another amino acid residue of the sequence
  MISC_FEATURE (12)..(12): Xaa is phenylalanine, tyrosine, valine, leucine, isoleucine, methionine, or an amino acid residue which is covalently linked to another amino acid residue of the sequence
  MISC_FEATURE (13)..(13): Xaa is alanine, valine, glycine, serine, or an amino acid residue which is covalently linked to another amino acid residue of the sequence
  MISC_FEATURE (14)..(14): Xaa is glutamic acid, aspartic acid, or an amino acid residue which is covalently linked to another amino acid residue of the sequence
  MISC_FEATURE (21)..(21): Xaa is glycine, alanine, serine, or an amino acid residue which is covalently linked to another amino acid residue of the sequence
  MISC_FEATURE (22)..(22): Xaa is alanine, valine, glycine, serine, or an amino acid residue which is covalently linked to another amino acid residue of the sequence
  MISC_FEATURE (23)..(23): Xaa is isoleucine, leucine, valine, phenylalanine, methionine, or an amino acid residue which is covalently linked to another amino acid residue of the sequence
  MISC_FEATURE (24)..(24): Xaa is isoleucine, leucine, valine, phenylalanine, methionine, or an amino acid residue which is covalently linked to another amino acid residue of the sequence
  MISC_FEATURE (25)..(25): Xaa is glycine, alanine, serine, or an amino acid residue which is covalently linked to another amino acid residue of the sequence
  MISC_FEATURE (26)..(26): Xaa is leucine, isoleucine, valine, phenylalanine, methionine, or an amino acid residue which is covalently linked to another amino acid residue of the sequence
  MISC_FEATURE (27)..(27): Xaa is methionine, valine, leucine, isoleucine, alanine, or an amino acid residue which is covalently linked to another amino acid residue of the sequence
  MISC_FEATURE (28)..(28): Xaa is valine, leucine, isoleucine, alanine, methionine, or an amino acid residue which is covalently linked to another amino acid residue of the sequence
  MISC_FEATURE (29)..(29): Xaa is glycine, alanine, serine, or an amino acid residue which is covalently linked to another amino acid residue of the sequence
  MISC_FEATURE (30)..(30): Xaa is glycine, alanine, serine, or an amino acid residue which is covalently linked to another amino acid residue of the sequence
GYEVXXXXXXXXXXDVGSNKXXXXXXXXXX

SEQ ID NO: 488 - protein, 29 aa, Artificial Sequence
  synthetic
  MISC_FEATURE (4)..(4): Xaa is histidine, tyrosine, serine, methionine, or an amino acid residue which is covalently linked to another amino acid residue of the sequence
  MISC_FEATURE (5)..(5): Xaa is histidine, tyrosine, serine, methionine, or an amino acid residue which is covalently linked to another amino acid residue of the sequence
  MISC_FEATURE (6)..(6): Xaa is glutamine, asparagine, methionine, serine, or an amino acid which is covalently linked to another amino acid residue of the sequence
  MISC_FEATURE (7)..(7): Xaa is lysine, arginine, or an amino acid residue which is covalently linked to another amino acid residue of the sequence
  MISC_FEATURE (8)..(8): Xaa is leucine, isoleucine, valine, phenylalanine, methionine, or an amino acid residue which is covalently linked to another amino acid residue of the sequence
  MISC_FEATURE (9)..(9): Xaa is valine, leucine, isoleucine, alanine, methionine, or an amino acid residue which is covalently linked to another amino acid residue of the sequence
  MISC_FEATURE (10)..(10): Xaa is phenylalanine, tyrosine, valine, leucine, isoleucine, methionine, or an amino acid residue which is covalently linked to another amino acid residue of the sequence
  MISC_FEATURE (11)..(11): Xaa is phenylalanine, tyrosine, valine, leucine, isoleucine, methionine, or an amino acid residue which is covalently linked to another amino acid residue of the sequence
  MISC_FEATURE (12)..(12): Xaa is alanine, valine, glycine, serine, or an amino acid residue which is covalently linked to another amino acid residue of the sequence
  MISC_FEATURE (13)..(13): Xaa is glutamic acid, aspartic acid, or an amino acid residue which is covalently linked to another amino acid residue of the sequence
  MISC_FEATURE (20)..(20): Xaa is glycine, alanine, serine, or an amino acid residue which is covalently linked to another amino acid residue of the sequence
  MISC_FEATURE (21)..(21): Xaa is alanine, valine, glycine, serine, or an amino acid residue which is covalently linked to another amino acid residue of the sequence
  MISC_FEATURE (22)..(22): Xaa is isoleucine, leucine, valine, phenylalanine, methionine, or an amino acid residue which is covalently linked to another amino acid residue of the sequence
  MISC_FEATURE (23)..(23): Xaa is isoleucine, leucine, valine, phenylalanine, methionine, or an amino acid residue which is covalently linked to another amino acid residue of the sequence
  MISC_FEATURE (24)..(24): Xaa is glycine, alanine, serine, or an amino acid residue which is covalently linked to another amino acid residue of the sequence
  MISC_FEATURE (25)..(25): Xaa is leucine, isoleucine, valine, phenylalanine, methionine, or an amino acid residue which is covalently linked to another amino acid residue of the sequence
  MISC_FEATURE (26)..(26): Xaa is methionine, valine, leucine, isoleucine, alanine, or an amino acid residue which is covalently linked to another amino acid residue of the sequence
  MISC_FEATURE (27)..(27): Xaa is valine, leucine, isoleucine, alanine, methionine, or an amino acid residue which is covalently linked to another amino acid residue of the sequence
  MISC_FEATURE (28)..(28): Xaa is glycine, alanine, serine, or an amino acid residue which is covalently linked to another amino acid residue of the sequence
  MISC_FEATURE (29)..(29): Xaa is glycine, alanine, serine, or an amino acid residue which is covalently linked to another amino acid residue of the sequence
YEVXXXXXXXXXXDVGSNKXXXXXXXXXX

SEQ ID NO: 489 - protein, 28 aa, Artificial Sequence
  synthetic
  MISC_FEATURE (3)..(3): Xaa is histidine, tyrosine, serine, methionine, or an amino acid residue which is covalently linked to another amino acid residue of the sequence
  MISC_FEATURE (4)..(4): Xaa is histidine, tyrosine, serine, methionine, or an amino acid residue which is covalently linked to another amino acid residue of the sequence
  MISC_FEATURE (5)..(5): Xaa is glutamine, asparagine, methionine, serine, or an amino acid which is covalently linked to another amino acid residue of the sequence
  MISC_FEATURE (6)..(6): Xaa is lysine, arginine, or an amino acid residue which is covalently linked to another amino acid residue of the sequence
  MISC_FEATURE (7)..(7): Xaa is leucine, isoleucine, valine, phenylalanine, methionine, or an amino acid residue which is covalently linked to another amino acid residue of the sequence
  MISC_FEATURE (8)..(8): Xaa is valine, leucine, isoleucine, alanine, methionine, or an amino acid residue which is covalently linked to another amino acid residue of the sequence
  MISC_FEATURE (9)..(9): Xaa is phenylalanine, tyrosine, valine, leucine, isoleucine, methionine, or an amino acid residue which is covalently linked to another amino acid residue of the sequence
  MISC_FEATURE (10)..(10): Xaa is phenylalanine, tyrosine, valine, leucine, isoleucine, methionine, or an amino acid residue which is covalently linked to another amino acid residue of the sequence
  MISC_FEATURE (11)..(11): Xaa is alanine, valine, glycine, serine, or an amino acid residue which is covalently linked to another amino acid residue of the sequence
  MISC_FEATURE (12)..(12): Xaa is glutamic acid, aspartic acid, or an amino acid residue which is covalently linked to another amino acid residue of the sequence
  MISC_FEATURE (19)..(19): Xaa is glycine, alanine, serine, or an amino acid residue which is covalently linked to another amino acid residue of the sequence
  MISC_FEATURE (20)..(20): Xaa is alanine, valine, glycine, serine, or an amino acid residue which is covalently linked to another amino acid residue of the sequence
  MISC_FEATURE (21)..(21): Xaa is isoleucine, leucine, valine, phenylalanine, methionine, or an amino acid residue which is covalently linked to another amino acid residue of the sequence
  MISC_FEATURE (22)..(22): Xaa is isoleucine, leucine, valine, phenylalanine, methionine, or an amino acid residue which is covalently linked to another amino acid residue of the sequence
  MISC_FEATURE (23)..(23): Xaa is glycine, alanine, serine, or an amino acid residue which is covalently linked to another amino acid residue of the sequence
  MISC_FEATURE (24)..(24): Xaa is leucine, isoleucine, valine, phenylalanine, methionine, or an amino acid residue which is covalently linked to another amino acid residue of the sequence
  MISC_FEATURE (25)..(25): Xaa is methionine, valine, leucine, isoleucine, alanine, or an amino acid residue which is covalently linked to another amino acid residue of the sequence
  MISC_FEATURE (26)..(26): Xaa is valine, leucine, isoleucine, alanine, methionine, or an amino acid residue which is covalently linked to another amino acid residue of the sequence
  MISC_FEATURE (27)..(27): Xaa is glycine, alanine, serine, or an amino acid residue which is covalently linked to another amino acid residue of the sequence
  MISC_FEATURE (28)..(28): Xaa is glycine, alanine, serine, or an amino acid residue which is covalently linked to another amino acid residue of the sequence
EVXXXXXXXXXXDVGSNKXXXXXXXXXX

SEQ ID NO: 490 - protein, 27 aa, Artificial Sequence
  synthetic
  MISC_FEATURE (2)..(2): Xaa is histidine, tyrosine, serine, methionine, or an amino acid residue which is covalently linked to another amino acid residue of the sequence
  MISC_FEATURE (3)..(3): Xaa is histidine, tyrosine, serine, methionine, or an amino acid residue which is covalently linked to another amino acid residue of the sequence
  MISC_FEATURE (4)..(4): Xaa is glutamine, asparagine, methionine, serine, or an amino acid which is covalently linked to another amino acid residue of the sequence
  MISC_FEATURE (5)..(5): Xaa is lysine, arginine, or an amino acid residue which is covalently linked to another amino acid residue of the sequence
  MISC_FEATURE (6)..(6): Xaa is leucine, isoleucine, valine, phenylalanine, methionine, or an amino acid residue which is covalently linked to another amino acid residue of the sequence
  MISC_FEATURE (7)..(7): Xaa is valine, leucine, isoleucine, alanine, methionine, or an amino acid residue which is covalently linked to another amino acid residue of the sequence
  MISC_FEATURE (8)..(8): Xaa is phenylalanine, tyrosine, valine, leucine, isoleucine, methionine, or an amino acid residue which is covalently linked to another amino acid residue of the sequence
  MISC_FEATURE (9)..(9): Xaa is phenylalanine, tyrosine, valine, leucine, isoleucine, methionine, or an amino acid residue which is covalently linked to another amino acid residue of the sequence
  MISC_FEATURE (10)..(10): Xaa is alanine, valine, glycine, serine, or an amino acid residue which is covalently linked to another amino acid residue of the sequence
  MISC_FEATURE (11)..(11): Xaa is glutamic acid, aspartic acid, or an amino acid residue which is covalently linked to another amino acid residue of the sequence
  MISC_FEATURE (18)..(18): Xaa is glycine, alanine, serine, or an amino acid residue which is covalently linked to another amino acid residue of the sequence
  MISC_FEATURE (19)..(19): Xaa is alanine, valine, glycine, serine, or an amino acid residue which is covalently linked to another amino acid residue of the sequence
  MISC_FEATURE (20)..(20): Xaa is isoleucine, leucine, valine, phenylalanine, methionine, or an amino acid residue which is covalently linked to another amino acid residue of the sequence
  MISC_FEATURE (21)..(21): Xaa is isoleucine, leucine, valine, phenylalanine, methionine, or an amino acid residue which is covalently linked to another amino acid residue of the sequence
  MISC_FEATURE (22)..(22): Xaa is glycine, alanine, serine, or an amino acid residue which is covalently linked to another amino acid residue of the sequence
  MISC_FEATURE (23)..(23): Xaa is leucine, isoleucine, valine, phenylalanine, methionine, or an amino acid residue which is covalently linked to another amino acid residue of the sequence
  MISC_FEATURE (24)..(24): Xaa is methionine, valine, leucine, isoleucine, alanine, or an amino acid residue which is covalently linked to another amino acid residue of the sequence
  MISC_FEATURE (25)..(25): Xaa is valine, leucine, isoleucine, alanine, methionine, or an amino acid residue which is covalently linked to another amino acid residue of the sequence
  MISC_FEATURE (26)..(26): Xaa is glycine, alanine, serine, or an amino acid residue which is covalently linked to another amino acid residue of the sequence
  MISC_FEATURE (27)..(27): Xaa is glycine, alanine, serine, or an amino acid residue which is covalently linked to another amino acid residue of the sequence
VXXXXXXXXXXDVGSNKXXXXXXXXXX

SEQ ID NO: 491 - protein, 26 aa, Artificial Sequence
  synthetic
  MISC_FEATURE (1)..(1): Xaa is histidine, tyrosine, serine, methionine, or an amino acid residue which is covalently linked to another amino acid residue of the sequence
  MISC_FEATURE (2)..(2): Xaa is histidine, tyrosine, serine, methionine, or an amino acid residue which is covalently linked to another amino acid residue of the sequence
  MISC_FEATURE (3)..(3): Xaa is glutamine, asparagine, methionine, serine, or an amino acid which is covalently linked to another amino acid residue of the sequence
  MISC_FEATURE (4)..(4): Xaa is lysine, arginine, or an amino acid residue which is covalently linked to another amino acid residue of the sequence
  MISC_FEATURE (5)..(5): Xaa is leucine, isoleucine, valine, phenylalanine, methionine, or an amino acid residue which is covalently linked to another amino acid residue of the sequence
  MISC_FEATURE (6)..(6): Xaa is valine, leucine, isoleucine, alanine, methionine, or an amino acid residue which is covalently linked to another amino acid residue of the sequence
  MISC_FEATURE (7)..(7): Xaa is phenylalanine, tyrosine, valine, leucine, isoleucine, methionine, or an amino acid residue which is covalently linked to another amino acid residue of the sequence
  MISC_FEATURE (8)..(8): Xaa is phenylalanine, tyrosine, valine, leucine, isoleucine, methionine, or an amino acid residue which is covalently linked to another amino acid residue of the sequence
  MISC_FEATURE (9)..(9): Xaa is alanine, valine, glycine, serine, or an amino acid residue which is covalently linked to another amino acid residue of the sequence
  MISC_FEATURE (10)..(10): Xaa is glutamic acid, aspartic acid, or an amino acid residue which is covalently linked to another amino acid residue of the sequence
  MISC_FEATURE (17)..(17): Xaa is glycine, alanine, serine, or an amino acid residue which is covalently linked to another amino acid residue of the sequence
  MISC_FEATURE (18)..(18): Xaa is alanine, valine, glycine, serine, or an amino acid residue which is covalently linked to another amino acid residue of the sequence
  MISC_FEATURE (19)..(19): Xaa is isoleucine, leucine, valine, phenylalanine, methionine, or an amino acid residue which is covalently linked to another amino acid residue of the sequence
  MISC_FEATURE (20)..(20): Xaa is isoleucine, leucine, valine, phenylalanine, methionine, or an amino acid residue which is covalently linked to another amino acid residue of the sequence
  MISC_FEATURE (21)..(21): Xaa is glycine, alanine, serine, or an amino acid residue which is covalently linked to another amino acid residue of the sequence
  MISC_FEATURE (22)..(22): Xaa is leucine, isoleucine, valine, phenylalanine, methionine, or an amino acid residue which is covalently linked to another amino acid residue of the sequence
  MISC_FEATURE (23)..(23): Xaa is methionine, valine, leucine, isoleucine, alanine, or an amino acid residue which is covalently linked to another amino acid residue of the sequence
  MISC_FEATURE (24)..(24): Xaa is valine, leucine, isoleucine, alanine, methionine, or an amino acid residue which is covalently linked to another amino acid residue of the sequence
  MISC_FEATURE (25)..(25): Xaa is glycine, alanine, serine, or an amino acid residue which is covalently linked to another amino acid residue of the sequence
  MISC_FEATURE (26)..(26): Xaa is glycine, alanine, serine, or an amino acid residue which is covalently linked to another amino acid residue of the sequence
XXXXXXXXXXDVGSNKXXXXXXXXXX

SEQ ID NO: 492 - protein, 25 aa, Artificial Sequence
  synthetic
  MISC_FEATURE (1)..(1): Xaa is histidine, tyrosine, serine, methionine, or an amino acid residue which is covalently linked to another amino acid residue of the sequence
  MISC_FEATURE (2)..(2): Xaa is glutamine, asparagine, methionine, serine, or an amino acid which is covalently linked to another amino acid residue of the sequence
  MISC_FEATURE (3)..(3): Xaa is lysine, arginine, or an amino acid residue which is covalently linked to another amino acid residue of the sequence
  MISC_FEATURE (4)..(4): Xaa is leucine, isoleucine, valine, phenylalanine, methionine, or an amino acid residue which is covalently linked to another amino acid residue of the sequence
  MISC_FEATURE (5)..(5): Xaa is valine, leucine, isoleucine, alanine, methionine, or an amino acid residue which is covalently linked to another amino acid residue of the sequence
  MISC_FEATURE (6)..(6): Xaa is phenylalanine, tyrosine, valine, leucine, isoleucine, methionine, or an amino acid residue which is covalently linked to another amino acid residue of the sequence
  MISC_FEATURE (7)..(7): Xaa is phenylalanine, tyrosine, valine, leucine, isoleucine, methionine, or an amino acid residue which is covalently linked to another amino acid residue of the sequence
  MISC_FEATURE (8)..(8): Xaa is alanine, valine, glycine, serine, or an amino acid residue which is covalently linked to another amino acid residue of the sequence
  MISC_FEATURE (9)..(9): Xaa is glutamic acid, aspartic acid, or an amino acid residue which is covalently linked to another amino acid residue of the sequence
  MISC_FEATURE (16)..(16): Xaa is glycine, alanine, serine, or an amino acid residue which is covalently linked to another amino acid residue of the sequence
  MISC_FEATURE (17)..(17): Xaa is alanine, valine, glycine, serine, or an amino acid residue which is covalently linked to another amino acid residue of the sequence
  MISC_FEATURE (18)..(18): Xaa is isoleucine, leucine, valine, phenylalanine, methionine, or an amino acid residue which is covalently linked to another amino acid residue of the sequence
  MISC_FEATURE (19)..(19): Xaa is isoleucine, leucine, valine, phenylalanine, methionine, or an amino acid residue which is covalently linked to another amino acid residue of the sequence
  MISC_FEATURE (20)..(20): Xaa is glycine, alanine, serine, or an amino acid residue which is covalently linked to another amino acid residue of the sequence
  MISC_FEATURE (21)..(21): Xaa is leucine, isoleucine, valine, phenylalanine, methionine, or an amino acid residue which is covalently linked to another amino acid residue of the sequence
  MISC_FEATURE (22)..(22): Xaa is methionine, valine, leucine, isoleucine, alanine, or an amino acid residue which is covalently linked to another amino acid residue of the sequence
  MISC_FEATURE (23)..(23): Xaa is valine, leucine, isoleucine, alanine, methionine, or an amino acid residue which is covalently linked to another amino acid residue of the sequence
  MISC_FEATURE (24)..(24): Xaa is glycine, alanine, serine, or an amino acid residue which is covalently linked to another amino acid residue of the sequence
XXXXXXXXXDVGSNKXXXXXXXXXG

SEQ ID NO: 493 - protein, 24 aa, Artificial Sequence
  synthetic
  MISC_FEATURE (1)..(1): Xaa is glutamine, asparagine, methionine, serine, or an amino acid which is covalently linked to another amino acid residue of the sequence
  MISC_FEATURE (2)..(2): Xaa is lysine, arginine, or an amino acid residue which is covalently linked to another amino acid residue of the sequence
  MISC_FEATURE (3)..(3): Xaa is leucine, isoleucine, valine, phenylalanine, methionine, or an amino acid residue which is covalently linked to another amino acid residue of the sequence
  MISC_FEATURE (4)..(4): Xaa is valine, leucine, isoleucine, alanine, methionine, or an amino acid residue which is covalently linked to another amino acid residue of the sequence
  MISC_FEATURE (5)..(5): Xaa is phenylalanine, tyrosine, valine, leucine, isoleucine, methionine, or an amino acid residue which is covalently linked to another amino acid residue of the sequence
  MISC_FEATURE (6)..(6): Xaa is phenylalanine, tyrosine, valine, leucine, isoleucine, methionine, or an amino acid residue which is covalently linked to another amino acid residue of the sequence
  MISC_FEATURE (7)..(7): Xaa is alanine, valine, glycine, serine, or an amino acid residue which is covalently linked to another amino acid residue of the sequence
  MISC_FEATURE (8)..(8): Xaa is glutamic acid, aspartic acid, or an amino acid residue which is covalently linked to another amino acid residue of the sequence
  MISC_FEATURE (15)..(15): Xaa is glycine, alanine, serine, or an amino acid residue which is covalently linked to another amino acid residue of the sequence
  MISC_FEATURE (16)..(16): Xaa is alanine, valine, glycine, serine, or an amino acid residue which is covalently linked to another amino acid residue of the sequence
  MISC_FEATURE (17)..(17): Xaa is isoleucine, leucine, valine, phenylalanine, methionine, or an amino acid residue which is covalently linked to another amino acid residue of the sequence
  MISC_FEATURE (18)..(18): Xaa is isoleucine, leucine, valine, phenylalanine, methionine, or an amino acid residue which is covalently linked to another amino acid residue of the sequence
  MISC_FEATURE (19)..(19): Xaa is glycine, alanine, serine, or an amino acid residue which is covalently linked to another amino acid residue of the sequence
  MISC_FEATURE (20)..(20): Xaa is leucine, isoleucine, valine, phenylalanine, methionine, or an amino acid residue which is covalently linked to another amino acid residue of the sequence
  MISC_FEATURE (21)..(21): Xaa is methionine, valine, leucine, isoleucine, alanine, or an amino acid residue which is covalently linked to another amino acid residue of the sequence
  MISC_FEATURE (22)..(22): Xaa is valine, leucine, isoleucine, alanine, methionine, or an amino acid residue which is covalently linked to another amino acid residue of the sequence
XXXXXXXXDVGSNKXXXXXXXXGG

SEQ ID NO: 494 - protein, 23 aa, Artificial Sequence
  synthetic
  MISC_FEATURE (1)..(1): Xaa is lysine, arginine, or an amino acid residue which is covalently linked to another amino acid residue of the sequence
  MISC_FEATURE (2)..(2): Xaa is leucine, isoleucine, valine, phenylalanine, methionine, or an amino acid residue which is covalently linked to another amino acid residue of the sequence
  MISC_FEATURE (3)..(3): Xaa is valine, leucine, isoleucine, alanine, methionine, or an amino acid residue which is covalently linked to another amino acid residue of the sequence
  MISC_FEATURE (4)..(4): Xaa is phenylalanine, tyrosine, valine, leucine, isoleucine, methionine, or an amino acid residue which is covalently linked to another amino acid residue of the sequence
  MISC_FEATURE (5)..(5): Xaa is phenylalanine, tyrosine, valine, leucine, isoleucine, methionine, or an amino acid residue which is covalently linked to another amino acid residue of the sequence
  MISC_FEATURE (6)..(6): Xaa is alanine, valine, glycine, serine, or an amino acid residue which is covalently linked to another amino acid residue of the sequence
  MISC_FEATURE (7)..(7): Xaa is glutamic acid, aspartic acid, or an amino acid residue which is covalently linked to another amino acid residue of the sequence
  MISC_FEATURE (14)..(14): Xaa is glycine, alanine, serine, or an amino acid residue which is covalently linked to another amino acid residue of the sequence
  MISC_FEATURE (15)..(15): Xaa is alanine, valine, glycine, serine, or an amino acid residue which is covalently linked to another amino acid residue of the sequence
  MISC_FEATURE (16)..(16): Xaa is isoleucine, leucine, valine, phenylalanine, methionine, or an amino acid residue which is covalently linked to another amino acid residue of the sequence
  MISC_FEATURE (17)..(17): Xaa is isoleucine, leucine, valine, phenylalanine, methionine, or an amino acid residue which is covalently linked to another amino acid residue of the sequence
  MISC_FEATURE (18)..(18): Xaa is glycine, alanine, serine, or an amino acid residue which is covalently linked to another amino acid residue of the sequence
  MISC_FEATURE (19)..(19): Xaa is leucine, isoleucine, valine, phenylalanine, methionine, or an amino acid residue which is covalently linked to another amino acid residue of the sequence
  MISC_FEATURE (20)..(20): Xaa is methionine, valine, leucine, isoleucine, alanine, or an amino acid residue which is covalently linked to another amino acid residue of the sequence
XXXXXXXDVGSNKXXXXXXXVGG

SEQ ID NO: 495 - protein, 22 aa, Artificial Sequence
  synthetic
  MISC_FEATURE (1)..(1): Xaa is leucine, isoleucine, valine, phenylalanine, methionine, or an amino acid residue which is covalently linked to another amino acid residue of the sequence
  MISC_FEATURE (2)..(2): Xaa is valine, leucine, isoleucine, alanine, methionine, or an amino acid residue which is covalently linked to another amino acid residue of the sequence
  MISC_FEATURE (3)..(3): Xaa is phenylalanine, tyrosine, valine, leucine, isoleucine, methionine, or an amino acid residue which is covalently linked to another amino acid residue of the sequence
  MISC_FEATURE (4)..(4): Xaa is phenylalanine, tyrosine, valine, leucine, isoleucine, methionine, or an amino acid residue which is covalently linked to another amino acid residue of the sequence
  MISC_FEATURE (5)..(5): Xaa is alanine, valine, glycine, serine, or an amino acid residue which is covalently linked to another amino acid residue of the sequence
  MISC_FEATURE (6)..(6): Xaa is glutamic acid, aspartic acid, or an amino acid residue which is covalently linked to another amino acid residue of the sequence
  MISC_FEATURE (13)..(13): Xaa is glycine, alanine, serine, or an amino acid residue which is covalently linked to another amino acid residue of the sequence
  MISC_FEATURE (14)..(14): Xaa is alanine, valine, glycine, serine, or an amino acid residue which is covalently linked to another amino acid residue of the sequence
  MISC_FEATURE (15)..(15): Xaa is isoleucine, leucine, valine, phenylalanine, methionine, or an amino acid residue which is covalently linked to another amino acid residue of the sequence
  MISC_FEATURE (16)..(16): Xaa is isoleucine, leucine, valine, phenylalanine, methionine, or an amino acid residue which is covalently linked to another amino acid residue of the sequence
  MISC_FEATURE (17)..(17): Xaa is glycine, alanine, serine, or an amino acid residue which is covalently linked to another amino acid residue of the sequence
  MISC_FEATURE (18)..(18): Xaa is leucine, isoleucine, valine, phenylalanine, methionine, or an amino acid residue which is covalently linked to another amino acid residue of the sequence
XXXXXXDVGSNKXXXXXXMVGG

SEQ ID NO: 496 - protein, 21 aa, Artificial Sequence
  synthetic
  MISC_FEATURE (1)..(1): Xaa is valine, leucine, isoleucine, alanine, methionine, or an amino acid residue which is covalently linked to another amino acid residue of the sequence
  MISC_FEATURE (2)..(2): Xaa is phenylalanine, tyrosine, valine, leucine, isoleucine, methionine, or an amino acid residue which is covalently linked to another amino acid residue of the sequence
  MISC_FEATURE (3)..(3): Xaa is phenylalanine, tyrosine, valine, leucine, isoleucine, methionine, or an amino acid residue which is covalently linked to another amino acid residue of the sequence
  MISC_FEATURE (4)..(4): Xaa is alanine, valine, glycine, serine, or an amino acid residue which is covalently linked to another amino acid residue of the sequence
  MISC_FEATURE (5)..(5): Xaa is glutamic acid, aspartic acid, or an amino acid residue which is covalently linked to another amino acid residue of the sequence
  MISC_FEATURE (12)..(12): Xaa is glycine, alanine, serine, or an amino acid residue which is covalently linked to another amino acid residue of the sequence
  MISC_FEATURE (13)..(13): Xaa is alanine, valine, glycine, serine, or an amino acid residue which is covalently linked to another amino acid residue of the sequence
  MISC_FEATURE (14)..(14): Xaa is isoleucine, leucine, valine, phenylalanine, methionine, or an amino acid residue which is covalently linked to another amino acid residue of the sequence
  MISC_FEATURE (15)..(15): Xaa is isoleucine, leucine, valine, phenylalanine, methionine, or an amino acid residue which is covalently linked to another amino acid residue of the sequence
  MISC_FEATURE (16)..(16): Xaa is glycine, alanine, serine, or an amino acid residue which is covalently linked to another amino acid residue of the sequence
XXXXXDVGSNKXXXXXLMVGG

SEQ ID NO: 497 - protein, 20 aa, Artificial Sequence
  synthetic
  MISC_FEATURE (1)..(1): Xaa is phenylalanine, tyrosine, valine, leucine, isoleucine, methionine, or an amino acid residue which is covalently linked to another amino acid residue of the sequence
  MISC_FEATURE (2)..(2): Xaa is phenylalanine, tyrosine, valine, leucine, isoleucine, methionine, or an amino acid residue which is covalently linked to another amino acid residue of the sequence
  MISC_FEATURE (3)..(3): Xaa is alanine, valine, glycine, serine, or an amino acid residue which is covalently linked to another amino acid residue of the sequence
  MISC_FEATURE (4)..(4): Xaa is glutamic acid, aspartic acid, or an amino acid residue which is covalently linked to another amino acid residue of the sequence
  MISC_FEATURE (11)..(11): Xaa is glycine, alanine, serine, or an amino acid residue which is covalently linked to another amino acid residue of the sequence
  MISC_FEATURE (12)..(12): Xaa is alanine, valine, glycine, serine, or an amino acid residue which is covalently linked to another amino acid residue of the sequence
  MISC_FEATURE (13)..(13): Xaa is isoleucine, leucine, valine, phenylalanine, methionine, or an amino acid residue which is covalently linked to another amino acid residue of the sequence
  MISC_FEATURE (14)..(14): Xaa is isoleucine, leucine, valine, phenylalanine, methionine, or an amino acid residue which is covalently linked to another amino acid residue of the sequence
XXXXDVGSNKXXXXGLMVGG

SEQ ID NO: 498 - protein, 19 aa, Artificial Sequence
  synthetic
  MISC_FEATURE (1)..(1): Xaa is phenylalanine, tyrosine, valine, leucine, isoleucine, methionine, or an amino acid residue which is covalently linked to another amino acid residue of the sequence
  MISC_FEATURE (2)..(2): Xaa is alanine, valine, glycine, serine, or an amino acid residue which is covalently linked to another amino acid residue of the sequence
  MISC_FEATURE (3)..(3): Xaa is glutamic acid, aspartic acid, or an amino acid residue which is covalently linked to another amino acid residue of the sequence
  MISC_FEATURE (10)..(10): Xaa is glycine, alanine, serine, or an amino acid residue which is covalently linked to another amino acid residue of the sequence
  MISC_FEATURE (11)..(11): Xaa is alanine, valine, glycine, serine, or an amino acid residue which is covalently linked to another amino acid residue of the sequence
  MISC_FEATURE (12)..(12): Xaa is isoleucine, leucine, valine, phenylalanine, methionine, or an amino acid residue which is covalently linked to another amino acid residue of the sequence
XXXDVGSNKXXXIGLMVGG

SEQ ID NO: 499 - protein, 18 aa, Artificial Sequence
  synthetic
  MISC_FEATURE (1)..(1): Xaa is alanine, valine, glycine, serine, or an amino acid residue which is covalently linked to another amino acid residue of the sequence
  MISC_FEATURE (2)..(2): Xaa is glutamic acid, aspartic acid, or an amino acid residue which is covalently linked to another amino acid residue of the sequence
  MISC_FEATURE (9)..(9): Xaa is glycine, alanine, serine, or an amino acid residue which is covalently linked to another amino acid residue of the sequence
  MISC_FEATURE (10)..(10): Xaa is alanine, valine, glycine, serine, or an amino acid residue which is covalently linked to another amino acid residue of the sequence
XXDVGSNKXXIIGLMVGG

SEQ ID NO: 500 - protein, 17 aa, Artificial Sequence
  synthetic
  MISC_FEATURE (1)..(1): Xaa is glutamic acid, aspartic acid, or an amino acid residue which is covalently linked to another amino acid residue of the sequence
  MISC_FEATURE (8)..(8): Xaa is glycine, alanine, serine, or an amino acid residue which is covalently linked to another amino acid residue of the sequence
XDVGSNKXAIIGLMVGG

SEQ ID NO: 501 - protein, 37 aa, Artificial Sequence
  synthetic
  MISC_FEATURE (14)..(14): Xaa is histidine, tyrosine, serine, methionine, or an amino acid residue which is covalently linked to another amino acid residue of the sequence
  MISC_FEATURE (15)..(15): Xaa is glutamine, asparagine, methionine, serine, or an amino acid which is covalently linked to another amino acid residue of the sequence
  MISC_FEATURE (16)..(16): Xaa is lysine, arginine, or an amino acid residue which is covalently linked to another amino acid residue of the sequence
  MISC_FEATURE (17)..(17): Xaa is leucine, isoleucine, valine, phenylalanine, methionine, or an amino acid residue which is covalently linked to another amino acid residue of the sequence
  MISC_FEATURE (18)..(18): Xaa is valine, leucine, isoleucine, alanine, methionine, or an amino acid residue which is covalently linked to another amino acid residue of the sequence
  MISC_FEATURE (19)..(19): Xaa is phenylalanine, tyrosine, valine, leucine, isoleucine, methionine, or an amino acid residue which is covalently linked to another amino acid residue of the sequence
  MISC_FEATURE (20)..(20): Xaa is phenylalanine, tyrosine, valine, leucine, isoleucine, methionine, or an amino acid residue which is covalently linked to another amino acid residue of the sequence
  MISC_FEATURE (21)..(21): Xaa is alanine, valine, glycine, serine, or an amino acid residue which is covalently linked to another amino acid residue of the sequence
  MISC_FEATURE (22)..(22): Xaa is glutamic acid, aspartic acid, or an amino acid residue which is covalently linked to another amino acid residue of the sequence
  MISC_FEATURE (29)..(29): Xaa is glycine, alanine, serine, or an amino acid residue which is covalently linked to another amino acid residue of the sequence
  MISC_FEATURE (30)..(30): Xaa is alanine, valine, glycine, serine, or an amino acid residue which is covalently linked to another amino acid residue of the sequence
  MISC_FEATURE (31)..(31): Xaa is isoleucine, leucine, valine, phenylalanine, methionine, or an amino acid residue which is covalently linked to another amino acid residue of the sequence
  MISC_FEATURE (32)..(32): Xaa is isoleucine, leucine, valine, phenylalanine, methionine, or an amino acid residue which is covalently linked to another amino acid residue of the sequence
  MISC_FEATURE (33)..(33): Xaa is glycine, alanine, serine, or an amino acid residue which is covalently linked to another amino acid residue of the sequence
  MISC_FEATURE (34)..(34): Xaa is leucine, isoleucine, valine, phenylalanine, methionine, or an amino acid residue which is covalently linked to another amino acid residue of the sequence
  MISC_FEATURE (35)..(35): Xaa is methionine, valine, leucine, isoleucine, alanine, or an amino acid residue which is covalently linked to another amino acid residue of the sequence
  MISC_FEATURE (36)..(36): Xaa is valine, leucine, isoleucine, alanine, methionine, or an amino acid residue which is covalently linked to another amino acid residue of the sequence
  MISC_FEATURE (37)..(37): Xaa is glycine, alanine, serine, or an amino acid residue which is covalently linked to another amino acid residue of the sequence
DAEFRHDSGYEVHXXXXXXXXXDVGSNKXXXXXXXXX

SEQ ID NO: 502 - protein, 36 aa, Artificial Sequence
  synthetic
  MISC_FEATURE (13)..(13): Xaa is histidine, tyrosine, serine, methionine, or an amino acid residue which is covalently linked to another amino acid residue of the sequence
  MISC_FEATURE (14)..(14): Xaa is glutamine, asparagine, methionine, serine, or an amino acid which is covalently linked to another amino acid residue of the sequence
  MISC_FEATURE (15)..(15): Xaa is lysine, arginine, or an amino acid residue which is covalently linked to another amino acid residue of the sequence
  MISC_FEATURE (16)..(16): Xaa is leucine, isoleucine, valine, phenylalanine, methionine, or an amino acid residue which is covalently linked to another amino acid residue of the sequence
  MISC_FEATURE (17)..(17): Xaa is valine, leucine, isoleucine, alanine, methionine, or an amino acid residue which is covalently linked to another amino acid residue of the sequence
  MISC_FEATURE (18)..(18): Xaa is phenylalanine, tyrosine, valine, leucine, isoleucine, methionine, or an amino acid residue which is covalently linked to another amino acid residue of the sequence
  MISC_FEATURE (19)..(19): Xaa is phenylalanine, tyrosine, valine, leucine, isoleucine, methionine, or an amino acid residue which is covalently linked to another amino acid residue of the sequence
  MISC_FEATURE (20)..(20): Xaa is alanine, valine, glycine, serine, or an amino acid residue which is covalently linked to another amino acid residue of the sequence
  MISC_FEATURE (21)..(21): Xaa is glutamic acid, aspartic acid, or an amino acid residue which is covalently linked to another amino acid residue of the sequence
  MISC_FEATURE (28)..(28): Xaa is glycine, alanine, serine, or an amino acid residue which is covalently linked to another amino acid residue of the sequence
  MISC_FEATURE (29)..(29): Xaa is alanine, valine, glycine, serine, or an amino acid residue which is covalently linked to another amino acid residue of the sequence
  MISC_FEATURE (30)..(30): Xaa is isoleucine, leucine, valine, phenylalanine, methionine, or an amino acid residue which is covalently linked to another amino acid residue of the sequence
  MISC_FEATURE (31)..(31): Xaa is isoleucine, leucine, valine, phenylalanine, methionine, or an amino acid residue which is covalently linked to another amino acid residue of the sequence
  MISC_FEATURE (32)..(32): Xaa is glycine, alanine, serine, or an amino acid residue which is covalently linked to another amino acid residue of the sequence
  MISC_FEATURE (33)..(33): Xaa is leucine, isoleucine, valine, phenylalanine, methionine, or an amino acid residue which is covalently linked to another amino acid residue of the sequence
  MISC_FEATURE (34)..(34): Xaa is methionine, valine, leucine, isoleucine, alanine, or an amino acid residue which is covalently linked to another amino acid residue of the sequence
  MISC_FEATURE (35)..(35): Xaa is valine, leucine, isoleucine, alanine, methionine, or an amino acid residue which is covalently linked to another amino acid residue of the sequence
  MISC_FEATURE (36)..(36): Xaa is glycine, alanine, serine, or an amino acid residue which is covalently linked to another amino acid residue of the sequence
AEFRHDSGYEVHXXXXXXXXXDVGSNKXXXXXXXXX

SEQ ID NO: 503 - protein, 35 aa, Artificial Sequence
  synthetic
  MISC_FEATURE (12)..(12): Xaa is histidine, tyrosine, serine, methionine, or an amino acid residue which is covalently linked to another amino acid residue of the sequence
  MISC_FEATURE (13)..(13): Xaa is glutamine, asparagine, methionine, serine, or an amino acid which is covalently linked to another amino acid residue of the sequence
  MISC_FEATURE (14)..(14): Xaa is lysine, arginine, or an amino acid residue which is covalently linked to another amino acid residue of the sequence
  MISC_FEATURE (15)..(15): Xaa is leucine, isoleucine, valine, phenylalanine, methionine, or an amino acid residue which is covalently linked to another amino acid residue of the sequence
  MISC_FEATURE (16)..(16): Xaa is valine, leucine, isoleucine, alanine, methionine, or an amino acid residue which is covalently linked to another amino acid residue of the sequence
  MISC_FEATURE (17)..(17): Xaa is phenylalanine, tyrosine, valine, leucine, isoleucine, methionine, or an amino acid residue which is covalently linked to another amino acid residue of the sequence
  MISC_FEATURE (18)..(18): Xaa is phenylalanine, tyrosine, valine, leucine, isoleucine, methionine, or an amino acid residue which is covalently linked to another amino acid residue of the sequence
  MISC_FEATURE (19)..(19): Xaa is alanine, valine, glycine, serine, or an amino acid residue which is covalently linked to another amino acid residue of the sequence
  MISC_FEATURE (20)..(20): Xaa is glutamic acid, aspartic acid, or an amino acid residue which is covalently linked to another amino acid residue of the sequence
  MISC_FEATURE (27)..(27): Xaa is glycine, alanine, serine, or an amino acid residue which is covalently linked to another amino acid residue of the sequence
  MISC_FEATURE (28)..(28): Xaa is alanine, valine, glycine, serine, or an amino acid residue which is covalently linked to another amino acid residue of the sequence
  MISC_FEATURE (29)..(29): Xaa is isoleucine, leucine, valine, phenylalanine, methionine, or an amino acid residue which is covalently linked to another amino acid residue of the sequence
  MISC_FEATURE (30)..(30): Xaa is isoleucine, leucine, valine, phenylalanine, methionine, or an amino acid residue which is covalently linked to another amino acid residue of the sequence
  MISC_FEATURE (31)..(31): Xaa is glycine, alanine, serine, or an amino acid residue which is covalently linked to another amino acid residue of the sequence
  MISC_FEATURE (32)..(32): Xaa is leucine, isoleucine, valine, phenylalanine, methionine, or an amino acid residue which is covalently linked to another amino acid residue of the sequence
  MISC_FEATURE (33)..(33): Xaa is methionine, valine, leucine, isoleucine, alanine, or an amino acid residue which is covalently linked to another amino acid residue of the sequence
  MISC_FEATURE (34)..(34): Xaa is valine, leucine, isoleucine, alanine, methionine, or an amino acid residue which is covalently linked to another amino acid residue of the sequence
  MISC_FEATURE (35)..(35): Xaa is glycine, alanine, serine, or an amino acid residue which is covalently linked to another amino acid residue of the sequence
EFRHDSGYEVHXXXXXXXXXDVGSNKXXXXXXXXX

SEQ ID NO: 504 - protein, 34 aa, Artificial Sequence
  synthetic
  MISC_FEATURE (11)..(11): Xaa is histidine, tyrosine, serine, methionine, or an amino acid residue which is covalently linked to another amino acid residue of the sequence
  MISC_FEATURE (12)..(12): Xaa is glutamine, asparagine, methionine, serine, or an amino acid which is covalently linked to another amino acid residue of the sequence
  MISC_FEATURE (13)..(13): Xaa is lysine, arginine, or an amino acid residue which is covalently linked to another amino acid residue of the sequence
  MISC_FEATURE (14)..(14): Xaa is leucine, isoleucine, valine, phenylalanine, methionine, or an amino acid residue which is covalently linked to another amino acid residue of the sequence
  MISC_FEATURE (15)..(15): Xaa is valine, leucine, isoleucine, alanine, methionine, or an amino acid residue which is covalently linked to another amino acid residue of the sequence
  MISC_FEATURE (16)..(16): Xaa is phenylalanine, tyrosine, valine, leucine, isoleucine, methionine, or an amino acid residue which is covalently linked to another amino acid residue of the sequence
  MISC_FEATURE (17)..(17): Xaa is phenylalanine, tyrosine, valine, leucine, isoleucine, methionine, or an amino acid residue which is covalently linked to another amino acid residue of the sequence
  MISC_FEATURE (18)..(18): Xaa is alanine, valine, glycine, serine, or an amino acid residue which is covalently linked to another amino acid residue of the sequence
  MISC_FEATURE (19)..(19): Xaa is glutamic acid, aspartic acid, or an amino acid residue which is covalently linked to another amino acid residue of the sequence
  MISC_FEATURE (26)..(26): Xaa is glycine, alanine, serine, or an amino acid residue which is covalently linked to another amino acid residue of the sequence
  MISC_FEATURE (27)..(27): Xaa is alanine, valine, glycine, serine, or an amino acid residue which is covalently linked to another amino acid residue of the sequence
  MISC_FEATURE (28)..(28): Xaa is isoleucine, leucine, valine, phenylalanine, methionine, or an amino acid residue which is covalently linked to another amino acid residue of the sequence
  MISC_FEATURE (29)..(29): Xaa is isoleucine, leucine, valine, phenylalanine, methionine, or an amino acid residue which is covalently linked to another amino acid residue of the sequence
  MISC_FEATURE (30)..(30): Xaa is glycine, alanine, serine, or an amino acid residue which is covalently linked to another amino acid residue of the sequence
  MISC_FEATURE (31)..(31): Xaa is leucine, isoleucine, valine, phenylalanine, methionine, or an amino acid residue which is covalently linked to another amino acid residue of the sequence
  MISC_FEATURE (32)..(32): Xaa is methionine, valine, leucine, isoleucine, alanine, or an amino acid residue which is covalently linked to another amino acid residue of the sequence
  MISC_FEATURE (33)..(33): Xaa is valine, leucine, isoleucine, alanine, methionine, or an amino acid residue which is covalently linked to another amino acid residue of the sequence
  MISC_FEATURE (34)..(34): Xaa is glycine, alanine, serine, or an amino acid residue which is covalently linked to another amino acid residue of the sequence
FRHDSGYEVHXXXXXXXXXDVGSNKXXXXXXXXX

SEQ ID NO: 505 - protein, 33 aa, Artificial Sequence
  synthetic
  MISC_FEATURE (10)..(10): Xaa is histidine, tyrosine, serine, methionine, or an amino acid residue which is covalently linked to another amino acid residue of the sequence
  MISC_FEATURE (11)..(11): Xaa is glutamine, asparagine, methionine, serine, or an amino acid which is covalently linked to another amino acid residue of the sequence
  MISC_FEATURE (12)..(12): Xaa is lysine, arginine, or an amino acid residue which is covalently linked to another amino acid residue of the sequence
  MISC_FEATURE (13)..(13): Xaa is leucine, isoleucine, valine, phenylalanine, methionine, or an amino acid residue which is covalently linked to another amino acid residue of the sequence
  MISC_FEATURE (14)..(14): Xaa is valine, leucine, isoleucine, alanine, methionine, or an amino acid residue which is covalently linked to another amino acid residue of the sequence
  MISC_FEATURE (15)..(15): Xaa is phenylalanine, tyrosine, valine, leucine, isoleucine, methionine, or an amino acid residue which is covalently linked to another amino acid residue of the sequence
  MISC_FEATURE (16)..(16): Xaa is phenylalanine, tyrosine, valine, leucine, isoleucine, methionine, or an amino acid residue which is covalently linked to another amino acid residue of the sequence
  MISC_FEATURE (17)..(17): Xaa is alanine, valine, glycine, serine, or an amino acid residue which is covalently linked to another amino acid residue of the sequence
  MISC_FEATURE (18)..(18): Xaa is glutamic acid, aspartic acid, or an amino acid residue which is covalently linked to another amino acid residue of the sequence
  MISC_FEATURE (25)..(25): Xaa is glycine, alanine, serine, or an amino acid residue which is covalently linked to another amino acid residue of the sequence
  MISC_FEATURE (26)..(26): Xaa is alanine, valine, glycine, serine, or an amino acid residue which is covalently linked to another amino acid residue of the sequence
  MISC_FEATURE (27)..(27): Xaa is isoleucine, leucine, valine, phenylalanine, methionine, or an amino acid residue which is covalently linked to another amino acid residue of the sequence
  MISC_FEATURE (28)..(28): Xaa is isoleucine, leucine, valine, phenylalanine, methionine, or an amino acid residue which is covalently linked to another amino acid residue of the sequence
  MISC_FEATURE (29)..(29): Xaa is glycine, alanine, serine, or an amino acid residue which is covalently linked to another amino acid residue of the sequence
  MISC_FEATURE (30)..(30): Xaa is leucine, isoleucine, valine, phenylalanine, methionine, or an amino acid residue which is covalently linked to another amino acid residue of the sequence
  MISC_FEATURE (31)..(31): Xaa is methionine, valine, leucine, isoleucine, alanine, or an amino acid residue which is covalently linked to another amino acid residue of the sequence
  MISC_FEATURE (32)..(32): Xaa is valine, leucine, isoleucine, alanine, methionine, or an amino acid residue which is covalently linked to another amino acid residue of the sequence
  MISC_FEATURE (33)..(33): Xaa is glycine, alanine, serine, or an amino acid residue which is covalently linked to another amino acid residue of the sequence
RHDSGYEVHXXXXXXXXXDVGSNKXXXXXXXXX

SEQ ID NO: 506 - protein, 32 aa, Artificial Sequence
  synthetic
  MISC_FEATURE (9)..(9): Xaa is histidine, tyrosine, serine, methionine, or an amino acid residue which is covalently linked to another amino acid residue of the sequence
  MISC_FEATURE (10)..(10): Xaa is glutamine, asparagine, methionine, serine, or an amino acid which is covalently linked to another amino acid residue of the sequence
  MISC_FEATURE (11)..(11): Xaa is lysine, arginine, or an amino acid residue which is covalently linked to another amino acid residue of the sequence
  MISC_FEATURE (12)..(12): Xaa is leucine, isoleucine, valine, phenylalanine, methionine, or an amino acid residue which is covalently linked to another amino acid residue of the sequence
  MISC_FEATURE (13)..(13): Xaa is valine, leucine, isoleucine, alanine, methionine, or an amino acid residue which is covalently linked to another amino acid residue of the sequence
  MISC_FEATURE (14)..(14): Xaa is phenylalanine, tyrosine, valine, leucine, isoleucine, methionine, or an amino acid residue which is covalently linked to another amino acid residue of the sequence
  MISC_FEATURE (15)..(15): Xaa is phenylalanine, tyrosine, valine, leucine, isoleucine, methionine, or an amino acid residue which is covalently linked to another amino acid residue of the sequence
  MISC_FEATURE (16)..(16): Xaa is alanine, valine, glycine, serine, or an amino acid residue which is covalently linked to another amino acid residue of the sequence
  MISC_FEATURE (17)..(17): Xaa is glutamic acid, aspartic acid, or an amino acid residue which is covalently linked to another amino acid residue of the sequence
  MISC_FEATURE (24)..(24): Xaa is glycine, alanine, serine, or an amino acid residue which is covalently linked to another amino acid residue of the sequence
  MISC_FEATURE (25)..(25): Xaa is alanine, valine, glycine, serine, or an amino acid residue which is covalently linked to another amino acid residue of the sequence
  MISC_FEATURE (26)..(26): Xaa is isoleucine, leucine, valine, phenylalanine, methionine, or an amino acid residue which is covalently linked to another amino acid residue of the sequence
  MISC_FEATURE (27)..(27): Xaa is isoleucine, leucine, valine, phenylalanine, methionine, or an amino acid residue which is covalently linked to another amino acid residue of the sequence
  MISC_FEATURE (28)..(28): Xaa is glycine, alanine, serine, or an amino acid residue which is covalently linked to another amino acid residue of the sequence
  MISC_FEATURE (29)..(29): Xaa is leucine, isoleucine, valine, phenylalanine, methionine, or an amino acid residue which is covalently linked to another amino acid residue of the sequence
  MISC_FEATURE (30)..(30): Xaa is methionine, valine, leucine, isoleucine, alanine, or an amino acid residue which is covalently linked to another amino acid residue of the sequence
  MISC_FEATURE (31)..(31): Xaa is valine, leucine, isoleucine, alanine, methionine, or an amino acid residue which is covalently linked to another amino acid residue of the sequence
  MISC_FEATURE (32)..(32): Xaa is glycine, alanine, serine, or an amino acid residue which is covalently linked to another amino acid residue of the sequence
HDSGYEVHXXXXXXXXXDVGSNKXXXXXXXXX

SEQ ID NO: 507 - protein, 31 aa, Artificial Sequence
  synthetic
  MISC_FEATURE (8)..(8): Xaa is histidine, tyrosine, serine, methionine, or an amino acid residue which is covalently linked to another amino acid residue of the sequence
  MISC_FEATURE (9)..(9): Xaa is glutamine, asparagine, methionine, serine, or an amino acid which is covalently linked to another amino acid residue of the sequence
  MISC_FEATURE (10)..(10): Xaa is lysine, arginine, or an amino acid residue which is covalently linked to another amino acid residue of the sequence
  MISC_FEATURE (11)..(11): Xaa is leucine, isoleucine, valine, phenylalanine, methionine, or an amino acid residue which is covalently linked to another amino acid residue of the sequence
  MISC_FEATURE (12)..(12): Xaa is valine, leucine, isoleucine, alanine, methionine, or an amino acid residue which is covalently linked to another amino acid residue of the sequence
  MISC_FEATURE (13)..(13): Xaa is phenylalanine, tyrosine, valine, leucine, isoleucine, methionine, or an amino acid residue which is covalently linked to another amino acid residue of the sequence
  MISC_FEATURE (14)..(14): Xaa is phenylalanine, tyrosine, valine, leucine, isoleucine, methionine, or an amino acid residue which is covalently linked to another amino acid residue of the sequence
  MISC_FEATURE (15)..(15): Xaa is alanine, valine, glycine, serine, or an amino acid residue which is covalently linked to another amino acid residue of the sequence
  MISC_FEATURE (16)..(16): Xaa is glutamic acid, aspartic acid, or an amino acid residue which is covalently linked to another amino acid residue of the sequence
  MISC_FEATURE (23)..(23): Xaa is glycine, alanine, serine, or an amino acid residue which is covalently linked to another amino acid residue of the sequence
  MISC_FEATURE (24)..(24): Xaa is alanine, valine, glycine, serine, or an amino acid residue which is covalently linked to another amino acid residue of the sequence
  MISC_FEATURE (25)..(25): Xaa is isoleucine, leucine, valine, phenylalanine, methionine, or an amino acid residue which is covalently linked to another amino acid residue of the sequence
  MISC_FEATURE (26)..(26): Xaa is isoleucine, leucine, valine, phenylalanine, methionine, or an amino acid residue which is covalently linked to another amino acid residue of the sequence
  MISC_FEATURE (27)..(27): Xaa is glycine, alanine, serine, or an amino acid residue which is covalently linked to another amino acid residue of the sequence
  MISC_FEATURE (28)..(28): Xaa is leucine, isoleucine, valine, phenylalanine, methionine, or an amino acid residue which is covalently linked to another amino acid residue of the sequence
  MISC_FEATURE (29)..(29): Xaa is methionine, valine, leucine, isoleucine, alanine, or an amino acid residue which is covalently linked to another amino acid residue of the sequence
  MISC_FEATURE (30)..(30): Xaa is valine, leucine, isoleucine, alanine, methionine, or an amino acid residue which is covalently linked to another amino acid residue of the sequence
  MISC_FEATURE (31)..(31): Xaa is glycine, alanine, serine, or an amino acid residue which is covalently linked to another amino acid residue of the sequence
DSGYEVHXXXXXXXXXDVGSNKXXXXXXXXX

SEQ ID NO: 508 - protein, 30 aa, Artificial Sequence
  synthetic
  MISC_FEATURE (7)..(7): Xaa is histidine, tyrosine, serine, methionine, or an amino acid residue which is covalently linked to another amino acid residue of the sequence
  MISC_FEATURE (8)..(8): Xaa is glutamine, asparagine, methionine, serine, or an amino acid which is covalently linked to another amino acid residue of the sequence
  MISC_FEATURE (9)..(9): Xaa is lysine, arginine, or an amino acid residue which is covalently linked to another amino acid residue of the sequence
  MISC_FEATURE (10)..(10): Xaa is leucine, isoleucine, valine, phenylalanine, methionine, or an amino acid residue which is covalently linked to another amino acid residue of the sequence
  MISC_FEATURE (11)..(11): Xaa is valine, leucine, isoleucine, alanine, methionine, or an amino acid residue which is covalently linked to another amino acid residue of the sequence
  MISC_FEATURE (12)..(12): Xaa is phenylalanine, tyrosine, valine, leucine, isoleucine, methionine, or an amino acid residue which is covalently linked to another amino acid residue of the sequence
  MISC_FEATURE (13)..(13): Xaa is phenylalanine, tyrosine, valine, leucine, isoleucine, methionine, or an amino acid residue which is covalently linked to another amino acid residue of the sequence
  MISC_FEATURE (14)..(14): Xaa is alanine, valine, glycine, serine, or an amino acid residue which is covalently linked to another amino acid residue of the sequence
  MISC_FEATURE (15)..(15): Xaa is glutamic acid, aspartic acid, or an amino acid residue which is covalently linked to another amino acid residue of the sequence
  MISC_FEATURE (22)..(22): Xaa is glycine, alanine, serine, or an amino acid residue which is covalently linked to another amino acid residue of the sequence
  MISC_FEATURE (23)..(23): Xaa is alanine, valine, glycine, serine, or an amino acid residue which is covalently linked to another amino acid residue of the sequence
  MISC_FEATURE (24)..(24): Xaa is isoleucine, leucine, valine, phenylalanine, methionine, or an amino acid residue which is covalently linked to another amino acid residue of the sequence
  MISC_FEATURE (25)..(25): Xaa is isoleucine, leucine, valine, phenylalanine, methionine, or an amino acid residue which is covalently linked to another amino acid residue of the sequence
  MISC_FEATURE (26)..(26): Xaa is glycine, alanine, serine, or an amino acid residue which is covalently linked to another amino acid residue of the sequence
  MISC_FEATURE (27)..(27): Xaa is leucine, isoleucine, valine, phenylalanine, methionine, or an amino acid residue which is covalently linked to another amino acid residue of the sequence
  MISC_FEATURE (28)..(28): Xaa is methionine, valine, leucine, isoleucine, alanine, or an amino acid residue which is covalently linked to another amino acid residue of the sequence
  MISC_FEATURE (29)..(29): Xaa is valine, leucine, isoleucine, alanine, methionine, or an amino acid residue which is covalently linked to another amino acid residue of the sequence
  MISC_FEATURE (30)..(30): Xaa is glycine, alanine, serine, or an amino acid residue which is covalently linked to another amino acid residue of the sequence
SGYEVHXXXXXXXXXDVGSNKXXXXXXXXX

SEQ ID NO: 509 - protein, 29 aa, Artificial Sequence
  synthetic
  MISC_FEATURE (6)..(6): Xaa is histidine, tyrosine, serine, methionine, or an amino acid residue which is covalently linked to another amino acid residue of the sequence
  MISC_FEATURE (7)..(7): Xaa is glutamine, asparagine, methionine, serine, or an amino acid which is covalently linked to another amino acid residue of the sequence
  MISC_FEATURE (8)..(8): Xaa is lysine, arginine, or an amino acid residue which is covalently linked to another amino acid residue of the sequence
  MISC_FEATURE (9)..(9): Xaa is leucine, isoleucine, valine, phenylalanine, methionine, or an amino acid residue which is covalently linked to another amino acid residue of the sequence
  MISC_FEATURE (10)..(10): Xaa is valine, leucine, isoleucine, alanine, methionine, or an amino acid residue which is covalently linked to another amino acid residue of the sequence
  MISC_FEATURE (11)..(11): Xaa is phenylalanine, tyrosine, valine, leucine, isoleucine, methionine, or an amino acid residue which is covalently linked to another amino acid residue of the sequence
  MISC_FEATURE (12)..(12): Xaa is phenylalanine, tyrosine, valine, leucine, isoleucine, methionine, or an amino acid residue which is covalently linked to another amino acid residue of the sequence
  MISC_FEATURE (13)..(13): Xaa is alanine, valine, glycine, serine, or an amino acid residue which is covalently linked to another amino acid residue of the sequence
  MISC_FEATURE (14)..(14): Xaa is glutamic acid, aspartic acid, or an amino acid residue which is covalently linked to another amino acid residue of the sequence
  MISC_FEATURE (21)..(21): Xaa is glycine, alanine, serine, or an amino acid residue which is covalently linked to another amino acid residue of the sequence
  MISC_FEATURE (22)..(22): Xaa is alanine, valine, glycine, serine, or an amino acid residue which is covalently linked to another amino acid residue of the sequence
  MISC_FEATURE (23)..(23): Xaa is isoleucine, leucine, valine, phenylalanine, methionine, or an amino acid residue which is covalently linked to another amino acid residue of the sequence
  MISC_FEATURE (24)..(24): Xaa is isoleucine, leucine, valine, phenylalanine, methionine, or an amino acid residue which is covalently linked to another amino acid residue of the sequence
  MISC_FEATURE (25)..(25): Xaa is glycine, alanine, serine, or an amino acid residue which is covalently linked to another amino acid residue of the sequence
  MISC_FEATURE (26)..(26): Xaa is leucine, isoleucine, valine, phenylalanine, methionine, or an amino acid residue which is covalently linked to another amino acid residue of the sequence
  MISC_FEATURE (27)..(27): Xaa is methionine, valine, leucine, isoleucine, alanine, or an amino acid residue which is covalently linked to another amino acid residue of the sequence
  MISC_FEATURE (28)..(28): Xaa is valine, leucine, isoleucine, alanine, methionine, or an amino acid residue which is covalently linked to another amino acid residue of the sequence
  MISC_FEATURE (29)..(29): Xaa is glycine, alanine, serine, or an amino acid residue which is covalently linked to another amino acid residue of the sequence
GYEVHXXXXXXXXXDVGSNKXXXXXXXXX

SEQ ID NO: 510 - protein, 28 aa, Artificial Sequence
  synthetic
  MISC_FEATURE (5)..(5): Xaa is histidine, tyrosine, serine, methionine, or an amino acid residue which is covalently linked to another amino acid residue of the sequence
  MISC_FEATURE (6)..(6): Xaa is glutamine, asparagine, methionine, serine, or an amino acid which is covalently linked to another amino acid residue of the sequence
  MISC_FEATURE (7)..(7): Xaa is lysine, arginine, or an amino acid residue which is covalently linked to another amino acid residue of the sequence
  MISC_FEATURE (8)..(8): Xaa is leucine, isoleucine, valine, phenylalanine, methionine, or an amino acid residue which is covalently linked to another amino acid residue of the sequence
  MISC_FEATURE (9)..(9): Xaa is valine, leucine, isoleucine, alanine, methionine, or an amino acid residue which is covalently linked to another amino acid residue of the sequence
  MISC_FEATURE (10)..(10): Xaa is phenylalanine, tyrosine, valine, leucine, isoleucine, methionine, or an amino acid residue which is covalently linked to another amino acid residue of the sequence
  MISC_FEATURE (11)..(11): Xaa is phenylalanine, tyrosine, valine, leucine, isoleucine, methionine, or an amino acid residue which is covalently linked to another amino acid residue of the sequence
  MISC_FEATURE (12)..(12): Xaa is alanine, valine, glycine, serine, or an amino acid residue which is covalently linked to another amino acid residue of the sequence
  MISC_FEATURE (13)..(13): Xaa is glutamic acid, aspartic acid, or an amino acid residue which is covalently linked to another amino acid residue of the sequence
  MISC_FEATURE (20)..(20): Xaa is glycine, alanine, serine, or an amino acid residue which is covalently linked to another amino acid residue of the sequence
  MISC_FEATURE (21)..(21): Xaa is alanine, valine, glycine, serine, or an amino acid residue which is covalently linked to another amino acid residue of the sequence
  MISC_FEATURE (22)..(22): Xaa is isoleucine, leucine, valine, phenylalanine, methionine, or an amino acid residue which is covalently linked to another amino acid residue of the sequence
  MISC_FEATURE (23)..(23): Xaa is isoleucine, leucine, valine, phenylalanine, methionine, or an amino acid residue which is covalently linked to another amino acid residue of the sequence
  MISC_FEATURE (24)..(24): Xaa is glycine, alanine, serine, or an amino acid residue which is covalently linked to another amino acid residue of the sequence
  MISC_FEATURE (25)..(25): Xaa is leucine, isoleucine, valine, phenylalanine, methionine, or an amino acid residue which is covalently linked to another amino acid residue of the sequence
  MISC_FEATURE (26)..(26): Xaa is methionine, valine, leucine, isoleucine, alanine, or an amino acid residue which is covalently linked to another amino acid residue of the sequence
  MISC_FEATURE (27)..(27): Xaa is valine, leucine, isoleucine, alanine, methionine, or an amino acid residue which is covalently linked to another amino acid residue of the sequence
  MISC_FEATURE (28)..(28): Xaa is glycine, alanine, serine, or an amino acid residue which is covalently linked to another amino acid residue of the sequence
YEVHXXXXXXXXXDVGSNKXXXXXXXXX

SEQ ID NO: 511 - protein, 27 aa, Artificial Sequence
  synthetic
  MISC_FEATURE (4)..(4): Xaa is histidine, tyrosine, serine, methionine, or an amino acid residue which is covalently linked to another amino acid residue of the sequence
  MISC_FEATURE (5)..(5): Xaa is glutamine, asparagine, methionine, serine, or an amino acid which is covalently linked to another amino acid residue of the sequence
  MISC_FEATURE (6)..(6): Xaa is lysine, arginine, or an amino acid residue which is covalently linked to another amino acid residue of the sequence
  MISC_FEATURE (7)..(7): Xaa is leucine, isoleucine, valine, phenylalanine, methionine, or an amino acid residue which is covalently linked to another amino acid residue of the sequence
  MISC_FEATURE (8)..(8): Xaa is valine, leucine, isoleucine, alanine, methionine, or an amino acid residue which is covalently linked to another amino acid residue of the sequence
  MISC_FEATURE (9)..(9): Xaa is phenylalanine, tyrosine, valine, leucine, isoleucine, methionine, or an amino acid residue which is covalently linked to another amino acid residue of the sequence
  MISC_FEATURE (10)..(10): Xaa is phenylalanine, tyrosine, valine, leucine, isoleucine, methionine, or an amino acid residue which is covalently linked to another amino acid residue of the sequence
  MISC_FEATURE (11)..(11): Xaa is alanine, valine, glycine, serine, or an amino acid residue which is covalently linked to another amino acid residue of the sequence
  MISC_FEATURE (12)..(12): Xaa is glutamic acid, aspartic acid, or an amino acid residue which is covalently linked to another amino acid residue of the sequence
  MISC_FEATURE (19)..(19): Xaa is glycine, alanine, serine, or an amino acid residue which is covalently linked to another amino acid residue of the sequence
  MISC_FEATURE (20)..(20): Xaa is alanine, valine, glycine, serine, or an amino acid residue which is covalently linked to another amino acid residue of the sequence
  MISC_FEATURE (21)..(21): Xaa is isoleucine, leucine, valine, phenylalanine, methionine, or an amino acid residue which is covalently linked to another amino acid residue of the sequence
  MISC_FEATURE (22)..(22): Xaa is isoleucine, leucine, valine, phenylalanine, methionine, or an amino acid residue which is covalently linked to another amino acid residue of the sequence
  MISC_FEATURE (23)..(23): Xaa is glycine, alanine, serine, or an amino acid residue which is covalently linked to another amino acid residue of the sequence
  MISC_FEATURE (24)..(24): Xaa is leucine, isoleucine, valine, phenylalanine, methionine, or an amino acid residue which is covalently linked to another amino acid residue of the sequence
  MISC_FEATURE (25)..(25): Xaa is methionine, valine, leucine, isoleucine, alanine, or an amino acid residue which is covalently linked to another amino acid residue of the sequence
  MISC_FEATURE (26)..(26): Xaa is valine, leucine, isoleucine, alanine, methionine, or an amino acid residue which is covalently linked to another amino acid residue of the sequence
  MISC_FEATURE (27)..(27): Xaa is glycine, alanine, serine, or an amino acid residue which is covalently linked to another amino acid residue of the sequence
EVHXXXXXXXXXDVGSNKXXXXXXXXX

SEQ ID NO: 512 - protein, 26 aa, Artificial Sequence
  synthetic
  MISC_FEATURE (3)..(3): Xaa is histidine, tyrosine, serine, methionine, or an amino acid residue which is covalently linked to another amino acid residue of the sequence
  MISC_FEATURE (4)..(4): Xaa is glutamine, asparagine, methionine, serine, or an amino acid which is covalently linked to another amino acid residue of the sequence
  MISC_FEATURE (5)..(5): Xaa is lysine, arginine, or an amino acid residue which is covalently linked to another amino acid residue of the sequence
  MISC_FEATURE (6)..(6): Xaa is leucine, isoleucine, valine, phenylalanine, methionine, or an amino acid residue which is covalently linked to another amino acid residue of the sequence
  MISC_FEATURE (7)..(7): Xaa is valine, leucine, isoleucine, alanine, methionine, or an amino acid residue which is covalently linked to another amino acid residue of the sequence
  MISC_FEATURE (8)..(8): Xaa is phenylalanine, tyrosine, valine, leucine, isoleucine, methionine, or an amino acid residue which is covalently linked to another amino acid residue of the sequence
  MISC_FEATURE (9)..(9): Xaa is phenylalanine, tyrosine, valine, leucine, isoleucine, methionine, or an amino acid residue which is covalently linked to another amino acid residue of the sequence
  MISC_FEATURE (10)..(10): Xaa is alanine, valine, glycine, serine, or an amino acid residue which is covalently linked to another amino acid residue of the sequence
  MISC_FEATURE (11)..(11): Xaa is glutamic acid, aspartic acid, or an amino acid residue which is covalently linked to another amino acid residue of the sequence
  MISC_FEATURE (18)..(18): Xaa is glycine, alanine, serine, or an amino acid residue which is covalently linked to another amino acid residue of the sequence
  MISC_FEATURE (19)..(19): Xaa is alanine, valine, glycine, serine, or an amino acid residue which is covalently linked to another amino acid residue of the sequence
  MISC_FEATURE (20)..(20): Xaa is isoleucine, leucine, valine, phenylalanine, methionine, or an amino acid residue which is covalently linked to another amino acid residue of the sequence
  MISC_FEATURE (21)..(21): Xaa is isoleucine, leucine, valine, phenylalanine, methionine, or an amino acid residue which is covalently linked to another amino acid residue of the sequence
  MISC_FEATURE (22)..(22): Xaa is glycine, alanine, serine, or an amino acid residue which is covalently linked to another amino acid residue of the sequence
  MISC_FEATURE (23)..(23): Xaa is leucine, isoleucine, valine, phenylalanine, methionine, or an amino acid residue which is covalently linked to another amino acid residue of the sequence
  MISC_FEATURE (24)..(24): Xaa is methionine, valine, leucine, isoleucine, alanine, or an amino acid residue which is covalently linked to another amino acid residue of the sequence
  MISC_FEATURE (25)..(25): Xaa is valine, leucine, isoleucine, alanine, methionine, or an amino acid residue which is covalently linked to another amino acid residue of the sequence
  MISC_FEATURE (26)..(26): Xaa is glycine, alanine, serine, or an amino acid residue which is covalently linked to another amino acid residue of the sequence
VHXXXXXXXXXDVGSNKXXXXXXXXX

SEQ ID NO: 513 - protein, 25 aa, Artificial Sequence
  synthetic
  MISC_FEATURE (2)..(2): Xaa is histidine, tyrosine, serine, methionine, or an amino acid residue which is covalently linked to another amino acid residue of the sequence
  MISC_FEATURE (3)..(3): Xaa is glutamine, asparagine, methionine, serine, or an amino acid which is covalently linked to another amino acid residue of the sequence
  MISC_FEATURE (4)..(4): Xaa is lysine, arginine, or an amino acid residue which is covalently linked to another amino acid residue of the sequence
  MISC_FEATURE (5)..(5): Xaa is leucine, isoleucine, valine, phenylalanine, methionine, or an amino acid residue which is covalently linked to another amino acid residue of the sequence
  MISC_FEATURE (6)..(6): Xaa is valine, leucine, isoleucine, alanine, methionine, or an amino acid residue which is covalently linked to another amino acid residue of the sequence
  MISC_FEATURE (7)..(7): Xaa is phenylalanine, tyrosine, valine, leucine, isoleucine, methionine, or an amino acid residue which is covalently linked to another amino acid residue of the sequence
  MISC_FEATURE (8)..(8): Xaa is phenylalanine, tyrosine, valine, leucine, isoleucine, methionine, or an amino acid residue which is covalently linked to another amino acid residue of the sequence
  MISC_FEATURE (9)..(9): Xaa is alanine, valine, glycine, serine, or an amino acid residue which is covalently linked to another amino acid residue of the sequence
  MISC_FEATURE (10)..(10): Xaa is glutamic acid, aspartic acid, or an amino acid residue which is covalently linked to another amino acid residue of the sequence
  MISC_FEATURE (17)..(17): Xaa is glycine, alanine, serine, or an amino acid residue which is covalently linked to another amino acid residue of the sequence
  MISC_FEATURE (18)..(18): Xaa is alanine, valine, glycine, serine, or an amino acid residue which is covalently linked to another amino acid residue of the sequence
  MISC_FEATURE (19)..(19): Xaa is isoleucine, leucine, valine, phenylalanine, methionine, or an amino acid residue which is covalently linked to another amino acid residue of the sequence
  MISC_FEATURE (20)..(20): Xaa is isoleucine, leucine, valine, phenylalanine, methionine, or an amino acid residue which is covalently linked to another amino acid residue of the sequence
  MISC_FEATURE (21)..(21): Xaa is glycine, alanine, serine, or an amino acid residue which is covalently linked to another amino acid residue of the sequence
  MISC_FEATURE (22)..(22): Xaa is leucine, isoleucine, valine, phenylalanine, methionine, or an amino acid residue which is covalently linked to another amino acid residue of the sequence
  MISC_FEATURE (23)..(23): Xaa is methionine, valine, leucine, isoleucine, alanine, or an amino acid residue which is covalently linked to another amino acid residue of the sequence
  MISC_FEATURE (24)..(24): Xaa is valine, leucine, isoleucine, alanine, methionine, or an amino acid residue which is covalently linked to another amino acid residue of the sequence
  MISC_FEATURE (25)..(25): Xaa is glycine, alanine, serine, or an amino acid residue which is covalently linked to another amino acid residue of the sequence
HXXXXXXXXXDVGSNKXXXXXXXXX

SEQ ID NO: 514 - protein, 24 aa, Artificial Sequence
  synthetic
  MISC_FEATURE (1)..(1): Xaa is histidine, tyrosine, serine, methionine, or an amino acid residue which is covalently linked to another amino acid residue of the sequence
  MISC_FEATURE (2)..(2): Xaa is glutamine, asparagine, methionine, serine, or an amino acid which is covalently linked to another amino acid residue of the sequence
  MISC_FEATURE (3)..(3): Xaa is lysine, arginine, or an amino acid residue which is covalently linked to another amino acid residue of the sequence
  MISC_FEATURE (4)..(4): Xaa is leucine, isoleucine, valine, phenylalanine, methionine, or an amino acid residue which is covalently linked to another amino acid residue of the sequence
  MISC_FEATURE (5)..(5): Xaa is valine, leucine, isoleucine, alanine, methionine, or an amino acid residue which is covalently linked to another amino acid residue of the sequence
  MISC_FEATURE (6)..(6): Xaa is phenylalanine, tyrosine, valine, leucine, isoleucine, methionine, or an amino acid residue which is covalently linked to another amino acid residue of the sequence
  MISC_FEATURE (7)..(7): Xaa is phenylalanine, tyrosine, valine, leucine, isoleucine, methionine, or an amino acid residue which is covalently linked to another amino acid residue of the sequence
  MISC_FEATURE (8)..(8): Xaa is alanine, valine, glycine, serine, or an amino acid residue which is covalently linked to another amino acid residue of the sequence
  MISC_FEATURE (9)..(9): Xaa is glutamic acid, aspartic acid, or an amino acid residue which is covalently linked to another amino acid residue of the sequence
  MISC_FEATURE (16)..(16): Xaa is glycine, alanine, serine, or an amino acid residue which is covalently linked to another amino acid residue of the sequence
  MISC_FEATURE (17)..(17): Xaa is alanine, valine, glycine, serine, or an amino acid residue which is covalently linked to another amino acid residue of the sequence
  MISC_FEATURE (18)..(18): Xaa is isoleucine, leucine, valine, phenylalanine, methionine, or an amino acid residue which is covalently linked to another amino acid residue of the sequence
  MISC_FEATURE (19)..(19): Xaa is isoleucine, leucine, valine, phenylalanine, methionine, or an amino acid residue which is covalently linked to another amino acid residue of the sequence
  MISC_FEATURE (20)..(20): Xaa is glycine, alanine, serine, or an amino acid residue which is covalently linked to another amino acid residue of the sequence
  MISC_FEATURE (21)..(21): Xaa is leucine, isoleucine, valine, phenylalanine, methionine, or an amino acid residue which is covalently linked to another amino acid residue of the sequence
  MISC_FEATURE (22)..(22): Xaa is methionine, valine, leucine, isoleucine, alanine, or an amino acid residue which is covalently linked to another amino acid residue of the sequence
  MISC_FEATURE (23)..(23): Xaa is valine, leucine, isoleucine, alanine, methionine, or an amino acid residue which is covalently linked to another amino acid residue of the sequence
  MISC_FEATURE (24)..(24): Xaa is glycine, alanine, serine, or an amino acid residue which is covalently linked to another amino acid residue of the sequence
XXXXXXXXXDVGSNKXXXXXXXXX

SEQ ID NO: 515 - protein, 23 aa, Artificial Sequence
  synthetic
  MISC_FEATURE (1)..(1): Xaa is glutamine, asparagine, methionine, serine, or an amino acid which is covalently linked to another amino acid residue of the sequence
  MISC_FEATURE (2)..(2): Xaa is lysine, arginine, or an amino acid residue which is covalently linked to another amino acid residue of the sequence
  MISC_FEATURE (3)..(3): Xaa is leucine, isoleucine, valine, phenylalanine, methionine, or an amino acid residue which is covalently linked to another amino acid residue of the sequence
  MISC_FEATURE (4)..(4): Xaa is valine, leucine, isoleucine, alanine, methionine, or an amino acid residue which is covalently linked to another amino acid residue of the sequence
  MISC_FEATURE (5)..(5): Xaa is phenylalanine, tyrosine, valine, leucine, isoleucine, methionine, or an amino acid residue which is covalently linked to another amino acid residue of the sequence
  MISC_FEATURE (6)..(6): Xaa is phenylalanine, tyrosine, valine, leucine, isoleucine, methionine, or an amino acid residue which is covalently linked to another amino acid residue of the sequence
  MISC_FEATURE (7)..(7): Xaa is alanine, valine, glycine, serine, or an amino acid residue which is covalently linked to another amino acid residue of the sequence
  MISC_FEATURE (8)..(8): Xaa is glutamic acid, aspartic acid, or an amino acid residue which is covalently linked to another amino acid residue of the sequence
  MISC_FEATURE (15)..(15): Xaa is glycine, alanine, serine, or an amino acid residue which is covalently linked to another amino acid residue of the sequence
  MISC_FEATURE (16)..(16): Xaa is alanine, valine, glycine, serine, or an amino acid residue which is covalently linked to another amino acid residue of the sequence
  MISC_FEATURE (17)..(17): Xaa is isoleucine, leucine, valine, phenylalanine, methionine, or an amino acid residue which is covalently linked to another amino acid residue of the sequence
  MISC_FEATURE (18)..(18): Xaa is isoleucine, leucine, valine, phenylalanine, methionine, or an amino acid residue which is covalently linked to another amino acid residue of the sequence
  MISC_FEATURE (19)..(19): Xaa is glycine, alanine, serine, or an amino acid residue which is covalently linked to another amino acid residue of the sequence
  MISC_FEATURE (20)..(20): Xaa is leucine, isoleucine, valine, phenylalanine, methionine, or an amino acid residue which is covalently linked to another amino acid residue of the sequence
  MISC_FEATURE (21)..(21): Xaa is methionine, valine, leucine, isoleucine, alanine, or an amino acid residue which is covalently linked to another amino acid residue of the sequence
  MISC_FEATURE (22)..(22): Xaa is valine, leucine, isoleucine, alanine, methionine, or an amino acid residue which is covalently linked to another amino acid residue of the sequence
XXXXXXXXDVGSNKXXXXXXXXG

SEQ ID NO: 516 - protein, 22 aa, Artificial Sequence
  synthetic
  MISC_FEATURE (1)..(1): Xaa is lysine, arginine, or an amino acid residue which is covalently linked to another amino acid residue of the sequence
  MISC_FEATURE (2)..(2): Xaa is leucine, isoleucine, valine, phenylalanine, methionine, or an amino acid residue which is covalently linked to another amino acid residue of the sequence
  MISC_FEATURE (3)..(3): Xaa is valine, leucine, isoleucine, alanine, methionine, or an amino acid residue which is covalently linked to another amino acid residue of the sequence
  MISC_FEATURE (4)..(4): Xaa is phenylalanine, tyrosine, valine, leucine, isoleucine, methionine, or an amino acid residue which is covalently linked to another amino acid residue of the sequence
  MISC_FEATURE (5)..(5): Xaa is phenylalanine, tyrosine, valine, leucine, isoleucine, methionine, or an amino acid residue which is covalently linked to another amino acid residue of the sequence
  MISC_FEATURE (6)..(6): Xaa is alanine, valine, glycine, serine, or an amino acid residue which is covalently linked to another amino acid residue of the sequence
  MISC_FEATURE (7)..(7): Xaa is glutamic acid, aspartic acid, or an amino acid residue which is covalently linked to another amino acid residue of the sequence
  MISC_FEATURE (14)..(14): Xaa is glycine, alanine, serine, or an amino acid residue which is covalently linked to another amino acid residue of the sequence
  MISC_FEATURE (15)..(15): Xaa is alanine, valine, glycine, serine, or an amino acid residue which is covalently linked to another amino acid residue of the sequence
  MISC_FEATURE (16)..(16): Xaa is isoleucine, leucine, valine, phenylalanine, methionine, or an amino acid residue which is covalently linked to another amino acid residue of the sequence
  MISC_FEATURE (17)..(17): Xaa is isoleucine, leucine, valine, phenylalanine, methionine, or an amino acid residue which is covalently linked to another amino acid residue of the sequence
  MISC_FEATURE (18)..(18): Xaa is glycine, alanine, serine, or an amino acid residue which is covalently linked to another amino acid residue of the sequence
  MISC_FEATURE (19)..(19): Xaa is leucine, isoleucine, valine, phenylalanine, methionine, or an amino acid residue which is covalently linked to another amino acid residue of the sequence
  MISC_FEATURE (20)..(20): Xaa is methionine, valine, leucine, isoleucine, alanine, or an amino acid residue which is covalently linked to another amino acid residue of the sequence
XXXXXXXDVGSNKXXXXXXXVG

SEQ ID NO: 517 - protein, 21 aa, Artificial Sequence
  synthetic
  MISC_FEATURE (1)..(1): Xaa is leucine, isoleucine, valine, phenylalanine, methionine, or an amino acid residue which is covalently linked to another amino acid residue of the sequence
  MISC_FEATURE (2)..(2): Xaa is valine, leucine, isoleucine, alanine, methionine, or an amino acid residue which is covalently linked to another amino acid residue of the sequence
  MISC_FEATURE (3)..(3): Xaa is phenylalanine, tyrosine, valine, leucine, isoleucine, methionine, or an amino acid residue which is covalently linked to another amino acid residue of the sequence
  MISC_FEATURE (4)..(4): Xaa is phenylalanine, tyrosine, valine, leucine, isoleucine, methionine, or an amino acid residue which is covalently linked to another amino acid residue of the sequence
  MISC_FEATURE (5)..(5): Xaa is alanine, valine, glycine, serine, or an amino acid residue which is covalently linked to another amino acid residue of the sequence
  MISC_FEATURE (6)..(6): Xaa is glutamic acid, aspartic acid, or an amino acid residue which is covalently linked to another amino acid residue of the sequence
  MISC_FEATURE (13)..(13): Xaa is glycine, alanine, serine, or an amino acid residue which is covalently linked to another amino acid residue of the sequence
  MISC_FEATURE (14)..(14): Xaa is alanine, valine, glycine, serine, or an amino acid residue which is covalently linked to another amino acid residue of the sequence
  MISC_FEATURE (15)..(15): Xaa is isoleucine, leucine, valine, phenylalanine, methionine, or an amino acid residue which is covalently linked to another amino acid residue of the sequence
  MISC_FEATURE (16)..(16): Xaa is isoleucine, leucine, valine, phenylalanine, methionine, or an amino acid residue which is covalently linked to another amino acid residue of the sequence
  MISC_FEATURE (17)..(17): Xaa is glycine, alanine, serine, or an amino acid residue which is covalently linked to another amino acid residue of the sequence
  MISC_FEATURE (18)..(18): Xaa is leucine, isoleucine, valine, phenylalanine, methionine, or an amino acid residue which is covalently linked to another amino acid residue of the sequence
XXXXXXDVGSNKXXXXXXMVG

SEQ ID NO: 518 - protein, 20 aa, Artificial Sequence
  synthetic
  MISC_FEATURE (1)..(1): Xaa is valine, leucine, isoleucine, alanine, methionine, or an amino acid residue which is covalently linked to another amino acid residue of the sequence
  MISC_FEATURE (2)..(2): Xaa is phenylalanine, tyrosine, valine, leucine, isoleucine, methionine, or an amino acid residue which is covalently linked to another amino acid residue of the sequence
  MISC_FEATURE (3)..(3): Xaa is phenylalanine, tyrosine, valine, leucine, isoleucine, methionine, or an amino acid residue which is covalently linked to another amino acid residue of the sequence
  MISC_FEATURE (4)..(4): Xaa is alanine, valine, glycine, serine, or an amino acid residue which is covalently linked to another amino acid residue of the sequence
  MISC_FEATURE (5)..(5): Xaa is glutamic acid, aspartic acid, or an amino acid residue which is covalently linked to another amino acid residue of the sequence
  MISC_FEATURE (12)..(12): Xaa is glycine, alanine, serine, or an amino acid residue which is covalently linked to another amino acid residue of the sequence
  MISC_FEATURE (13)..(13): Xaa is alanine, valine, glycine, serine, or an amino acid residue which is covalently linked to another amino acid residue of the sequence
  MISC_FEATURE (14)..(14): Xaa is isoleucine, leucine, valine, phenylalanine, methionine, or an amino acid residue which is covalently linked to another amino acid residue of the sequence
  MISC_FEATURE (15)..(15): Xaa is isoleucine, leucine, valine, phenylalanine, methionine, or an amino acid residue which is covalently linked to another amino acid residue of the sequence
  MISC_FEATURE (16)..(16): Xaa is glycine, alanine, serine, or an amino acid residue which is covalently linked to another amino acid residue of the sequence
XXXXXDVGSNKXXXXXLMVG

SEQ ID NO: 519 - protein, 19 aa, Artificial Sequence
  synthetic
  MISC_FEATURE (1)..(1): Xaa is phenylalanine, tyrosine, valine, leucine, isoleucine, methionine, or an amino acid residue which is covalently linked to another amino acid residue of the sequence
  MISC_FEATURE (2)..(2): Xaa is phenylalanine, tyrosine, valine, leucine, isoleucine, methionine, or an amino acid residue which is covalently linked to another amino acid residue of the sequence
  MISC_FEATURE (3)..(3): Xaa is alanine, valine, glycine, serine, or an amino acid residue which is covalently linked to another amino acid residue of the sequence
  MISC_FEATURE (4)..(4): Xaa is glutamic acid, aspartic acid, or an amino acid residue which is covalently linked to another amino acid residue of the sequence
  MISC_FEATURE (11)..(11): Xaa is glycine, alanine, serine, or an amino acid residue which is covalently linked to another amino acid residue of the sequence
  MISC_FEATURE (12)..(12): Xaa is alanine, valine, glycine, serine, or an amino acid residue which is covalently linked to another amino acid residue of the sequence
  MISC_FEATURE (13)..(13): Xaa is isoleucine, leucine, valine, phenylalanine, methionine, or an amino acid residue which is covalently linked to another amino acid residue of the sequence
  MISC_FEATURE (14)..(14): Xaa is isoleucine, leucine, valine, phenylalanine, methionine, or an amino acid residue which is covalently linked to another amino acid residue of the sequence
XXXXDVGSNKXXXXGLMVG

SEQ ID NO: 520 - protein, 18 aa, Artificial Sequence
  synthetic
  MISC_FEATURE (1)..(1): Xaa is phenylalanine, tyrosine, valine, leucine, isoleucine, methionine, or an amino acid residue which is covalently linked to another amino acid residue of the sequence
  MISC_FEATURE (2)..(2): Xaa is alanine, valine, glycine, serine, or an amino acid residue which is covalently linked to another amino acid residue of the sequence
  MISC_FEATURE (3)..(3): Xaa is glutamic acid, aspartic acid, or an amino acid residue which is covalently linked to another amino acid residue of the sequence
  MISC_FEATURE (10)..(10): Xaa is glycine, alanine, serine, or an amino acid residue which is covalently linked to another amino acid residue of the sequence
  MISC_FEATURE (11)..(11): Xaa is alanine, valine, glycine, serine, or an amino acid residue which is covalently linked to another amino acid residue of the sequence
  MISC_FEATURE (12)..(12): Xaa is isoleucine, leucine, valine, phenylalanine, methionine, or an amino acid residue which is covalently linked to another amino acid residue of the sequence
XXXDVGSNKXXXIGLMVG

SEQ ID NO: 521 - protein, 17 aa, Artificial Sequence
  synthetic
  MISC_FEATURE (1)..(1): Xaa is alanine, valine, glycine, serine, or an amino acid residue which is covalently linked to another amino acid residue of the sequence
  MISC_FEATURE (2)..(2): Xaa is glutamic acid, aspartic acid, or an amino acid residue which is covalently linked to another amino acid residue of the sequence
  MISC_FEATURE (9)..(9): Xaa is glycine, alanine, serine, or an amino acid residue which is covalently linked to another amino acid residue of the sequence
  MISC_FEATURE (10)..(10): Xaa is alanine, valine, glycine, serine, or an amino acid residue which is covalently linked to another amino acid residue of the sequence
XXDVGSNKXXIIGLMVG

SEQ ID NO: 522 - protein, 16 aa, Artificial Sequence
  synthetic
  MISC_FEATURE (1)..(1): Xaa is glutamic acid, aspartic acid, or an amino acid residue which is covalently linked to another amino acid residue of the sequence
  MISC_FEATURE (8)..(8): Xaa is glycine, alanine, serine, or an amino acid residue which is covalently linked to another amino acid residue of the sequence
XDVGSNKXAIIGLMVG

SEQ ID NO: 523 - protein, 36 aa, Artificial Sequence
  synthetic
  MISC_FEATURE (15)..(15): Xaa is glutamine, asparagine, methionine, serine, or an amino acid which is covalently linked to another amino acid residue of the sequence
  MISC_FEATURE (16)..(16): Xaa is lysine, arginine, or an amino acid residue which is covalently linked to another amino acid residue of the sequence
  MISC_FEATURE (17)..(17): Xaa is leucine, isoleucine, valine, phenylalanine, methionine, or an amino acid residue which is covalently linked to another amino acid residue of the sequence
  MISC_FEATURE (18)..(18): Xaa is valine, leucine, isoleucine, alanine, methionine, or an amino acid residue which is covalently linked to another amino acid residue of the sequence
  MISC_FEATURE (19)..(19): Xaa is phenylalanine, tyrosine, valine, leucine, isoleucine, methionine, or an amino acid residue which is covalently linked to another amino acid residue of the sequence
  MISC_FEATURE (20)..(20): Xaa is phenylalanine, tyrosine, valine, leucine, isoleucine, methionine, or an amino acid residue which is covalently linked to another amino acid residue of the sequence
  MISC_FEATURE (21)..(21): Xaa is alanine, valine, glycine, serine, or an amino acid residue which is covalently linked to another amino acid residue of the sequence
  MISC_FEATURE (22)..(22): Xaa is glutamic acid, aspartic acid, or an amino acid residue which is covalently linked to another amino acid residue of the sequence
  MISC_FEATURE (29)..(29): Xaa is glycine, alanine, serine, or an amino acid residue which is covalently linked to another amino acid residue of the sequence
  MISC_FEATURE (30)..(30): Xaa is alanine, valine, glycine, serine, or an amino acid residue which is covalently linked to another amino acid residue of the sequence
  MISC_FEATURE (31)..(31): Xaa is isoleucine, leucine, valine, phenylalanine, methionine, or an amino acid residue which is covalently linked to another amino acid residue of the sequence
  MISC_FEATURE (32)..(32): Xaa is isoleucine, leucine, valine, phenylalanine, methionine, or an amino acid residue which is covalently linked to another amino acid residue of the sequence
  MISC_FEATURE (33)..(33): Xaa is glycine, alanine, serine, or an amino acid residue which is covalently linked to another amino acid residue of the sequence
  MISC_FEATURE (34)..(34): Xaa is leucine, isoleucine, valine, phenylalanine, methionine, or an amino acid residue which is covalently linked to another amino acid residue of the sequence
  MISC_FEATURE (35)..(35): Xaa is methionine, valine, leucine, isoleucine, alanine, or an amino acid residue which is covalently linked to another amino acid residue of the sequence
  MISC_FEATURE (36)..(36): Xaa is valine, leucine, isoleucine, alanine, methionine, or an amino acid residue which is covalently linked to another amino acid residue of the sequence
DAEFRHDSGYEVHHXXXXXXXXDVGSNKXXXXXXXX

SEQ ID NO: 524 - protein, 35 aa, Artificial Sequence
  synthetic
  MISC_FEATURE (14)..(14): Xaa is glutamine, asparagine, methionine, serine, or an amino acid which is covalently linked to another amino acid residue of the sequence
  MISC_FEATURE (15)..(15): Xaa is lysine, arginine, or an amino acid residue which is covalently linked to another amino acid residue of the sequence
  MISC_FEATURE (16)..(16): Xaa is leucine, isoleucine, valine, phenylalanine, methionine, or an amino acid residue which is covalently linked to another amino acid residue of the sequence
  MISC_FEATURE (17)..(17): Xaa is valine, leucine, isoleucine, alanine, methionine, or an amino acid residue which is covalently linked to another amino acid residue of the sequence
  MISC_FEATURE (18)..(18): Xaa is phenylalanine, tyrosine, valine, leucine, isoleucine, methionine, or an amino acid residue which is covalently linked to another amino acid residue of the sequence
  MISC_FEATURE (19)..(19): Xaa is phenylalanine, tyrosine, valine, leucine, isoleucine, methionine, or an amino acid residue which is covalently linked to another amino acid residue of the sequence
  MISC_FEATURE (20)..(20): Xaa is alanine, valine, glycine, serine, or an amino acid residue which is covalently linked to another amino acid residue of the sequence
  MISC_FEATURE (21)..(21): Xaa is glutamic acid, aspartic acid, or an amino acid residue which is covalently linked to another amino acid residue of the sequence
  MISC_FEATURE (28)..(28): Xaa is glycine, alanine, serine, or an amino acid residue which is covalently linked to another amino acid residue of the sequence
  MISC_FEATURE (29)..(29): Xaa is alanine, valine, glycine, serine, or an amino acid residue which is covalently linked to another amino acid residue of the sequence
  MISC_FEATURE (30)..(30): Xaa is isoleucine, leucine, valine, phenylalanine, methionine, or an amino acid residue which is covalently linked to another amino acid residue of the sequence
  MISC_FEATURE (31)..(31): Xaa is isoleucine, leucine, valine, phenylalanine, methionine, or an amino acid residue which is covalently linked to another amino acid residue of the sequence
  MISC_FEATURE (32)..(32): Xaa is glycine, alanine, serine, or an amino acid residue which is covalently linked to another amino acid residue of the sequence
  MISC_FEATURE (33)..(33): Xaa is leucine, isoleucine, valine, phenylalanine, methionine, or an amino acid residue which is covalently linked to another amino acid residue of the sequence
  MISC_FEATURE (34)..(34): Xaa is methionine, valine, leucine, isoleucine, alanine, or an amino acid residue which is covalently linked to another amino acid residue of the sequence
  MISC_FEATURE (35)..(35): Xaa is valine, leucine, isoleucine, alanine, methionine, or an amino acid residue which is covalently linked to another amino acid residue of the sequence
AEFRHDSGYEVHHXXXXXXXXDVGSNKXXXXXXXX

SEQ ID NO: 525 - protein, 34 aa, Artificial Sequence
  synthetic
  MISC_FEATURE (13)..(13): Xaa is glutamine, asparagine, methionine, serine, or an amino acid which is covalently linked to another amino acid residue of the sequence
  MISC_FEATURE (14)..(14): Xaa is lysine, arginine, or an amino acid residue which is covalently linked to another amino acid residue of the sequence
  MISC_FEATURE (15)..(15): Xaa is leucine, isoleucine, valine, phenylalanine, methionine, or an amino acid residue which is covalently linked to another amino acid residue of the sequence
  MISC_FEATURE (16)..(16): Xaa is valine, leucine, isoleucine, alanine, methionine, or an amino acid residue which is covalently linked to another amino acid residue of the sequence
  MISC_FEATURE (17)..(17): Xaa is phenylalanine, tyrosine, valine, leucine, isoleucine, methionine, or an amino acid residue which is covalently linked to another amino acid residue of the sequence
  MISC_FEATURE (18)..(18): Xaa is phenylalanine, tyrosine, valine, leucine, isoleucine, methionine, or an amino acid residue which is covalently linked to another amino acid residue of the sequence
  MISC_FEATURE (19)..(19): Xaa is alanine, valine, glycine, serine, or an amino acid residue which is covalently linked to another amino acid residue of the sequence
  MISC_FEATURE (20)..(20): Xaa is glutamic acid, aspartic acid, or an amino acid residue which is covalently linked to another amino acid residue of the sequence
  MISC_FEATURE (27)..(27): Xaa is glycine, alanine, serine, or an amino acid residue which is covalently linked to another amino acid residue of the sequence
  MISC_FEATURE (28)..(28): Xaa is alanine, valine, glycine, serine, or an amino acid residue which is covalently linked to another amino acid residue of the sequence
  MISC_FEATURE (29)..(29): Xaa is isoleucine, leucine, valine, phenylalanine, methionine, or an amino acid residue which is covalently linked to another amino acid residue of the sequence
  MISC_FEATURE (30)..(30): Xaa is isoleucine, leucine, valine, phenylalanine, methionine, or an amino acid residue which is covalently linked to another amino acid residue of the sequence
  MISC_FEATURE (31)..(31): Xaa is glycine, alanine, serine, or an amino acid residue which is covalently linked to another amino acid residue of the sequence
  MISC_FEATURE (32)..(32): Xaa is leucine, isoleucine, valine, phenylalanine, methionine, or an amino acid residue which is covalently linked to another amino acid residue of the sequence
  MISC_FEATURE (33)..(33): Xaa is methionine, valine, leucine, isoleucine, alanine, or an amino acid residue which is covalently linked to another amino acid residue of the sequence
  MISC_FEATURE (34)..(34): Xaa is valine, leucine, isoleucine, alanine, methionine, or an amino acid residue which is covalently linked to another amino acid residue of the sequence
EFRHDSGYEVHHXXXXXXXXDVGSNKXXXXXXXX

SEQ ID NO: 526 - protein, 33 aa, Artificial Sequence
  synthetic
  MISC_FEATURE (12)..(12): Xaa is glutamine, asparagine, methionine, serine, or an amino acid which is covalently linked to another amino acid residue of the sequence
  MISC_FEATURE (13)..(13): Xaa is lysine, arginine, or an amino acid residue which is covalently linked to another amino acid residue of the sequence
  MISC_FEATURE (14)..(14): Xaa is leucine, isoleucine, valine, phenylalanine, methionine, or an amino acid residue which is covalently linked to another amino acid residue of the sequence
  MISC_FEATURE (15)..(15): Xaa is valine, leucine, isoleucine, alanine, methionine, or an amino acid residue which is covalently linked to another amino acid residue of the sequence
  MISC_FEATURE (16)..(16): Xaa is phenylalanine, tyrosine, valine, leucine, isoleucine, methionine, or an amino acid residue which is covalently linked to another amino acid residue of the sequence
  MISC_FEATURE (17)..(17): Xaa is phenylalanine, tyrosine, valine, leucine, isoleucine, methionine, or an amino acid residue which is covalently linked to another amino acid residue of the sequence
  MISC_FEATURE (18)..(18): Xaa is alanine, valine, glycine, serine, or an amino acid residue which is covalently linked to another amino acid residue of the sequence
  MISC_FEATURE (19)..(19): Xaa is glutamic acid, aspartic acid, or an amino acid residue which is covalently linked to another amino acid residue of the sequence
  MISC_FEATURE (26)..(26): Xaa is glycine, alanine, serine, or an amino acid residue which is covalently linked to another amino acid residue of the sequence
  MISC_FEATURE (27)..(27): Xaa is alanine, valine, glycine, serine, or an amino acid residue which is covalently linked to another amino acid residue of the sequence
  MISC_FEATURE (28)..(28): Xaa is isoleucine, leucine, valine, phenylalanine, methionine, or an amino acid residue which is covalently linked to another amino acid residue of the sequence
  MISC_FEATURE (29)..(29): Xaa is isoleucine, leucine, valine, phenylalanine, methionine, or an amino acid residue which is covalently linked to another amino acid residue of the sequence
  MISC_FEATURE (30)..(30): Xaa is glycine, alanine, serine, or an amino acid residue which is covalently linked to another amino acid residue of the sequence
  MISC_FEATURE (31)..(31): Xaa is leucine, isoleucine, valine, phenylalanine, methionine, or an amino acid residue which is covalently linked to another amino acid residue of the sequence
  MISC_FEATURE (32)..(32): Xaa is methionine, valine, leucine, isoleucine, alanine, or an amino acid residue which is covalently linked to another amino acid residue of the sequence
  MISC_FEATURE (33)..(33): Xaa is valine, leucine, isoleucine, alanine, methionine, or an amino acid residue which is covalently linked to another amino acid residue of the sequence
FRHDSGYEVHHXXXXXXXXDVGSNKXXXXXXXX

SEQ ID NO: 527 - protein, 32 aa, Artificial Sequence
  synthetic
  MISC_FEATURE (11)..(11): Xaa is glutamine, asparagine, methionine, serine, or an amino acid which is covalently linked to another amino acid residue of the sequence
  MISC_FEATURE (12)..(12): Xaa is lysine, arginine, or an amino acid residue which is covalently linked to another amino acid residue of the sequence
  MISC_FEATURE (13)..(13): Xaa is leucine, isoleucine, valine, phenylalanine, methionine, or an amino acid residue which is covalently linked to another amino acid residue of the sequence
  MISC_FEATURE (14)..(14): Xaa is valine, leucine, isoleucine, alanine, methionine, or an amino acid residue which is covalently linked to another amino acid residue of the sequence
  MISC_FEATURE (15)..(15): Xaa is phenylalanine, tyrosine, valine, leucine, isoleucine, methionine, or an amino acid residue which is covalently linked to another amino acid residue of the sequence
  MISC_FEATURE (16)..(16): Xaa is phenylalanine, tyrosine, valine, leucine, isoleucine, methionine, or an amino acid residue which is covalently linked to another amino acid residue of the sequence
  MISC_FEATURE (17)..(17): Xaa is alanine, valine, glycine, serine, or an amino acid residue which is covalently linked to another amino acid residue of the sequence
  MISC_FEATURE (18)..(18): Xaa is glutamic acid, aspartic acid, or an amino acid residue which is covalently linked to another amino acid residue of the sequence
  MISC_FEATURE (25)..(25): Xaa is glycine, alanine, serine, or an amino acid residue which is covalently linked to another amino acid residue of the sequence
  MISC_FEATURE (26)..(26): Xaa is alanine, valine, glycine, serine, or an amino acid residue which is covalently linked to another amino acid residue of the sequence
  MISC_FEATURE (27)..(27): Xaa is isoleucine, leucine, valine, phenylalanine, methionine, or an amino acid residue which is covalently linked to another amino acid residue of the sequence
  MISC_FEATURE (28)..(28): Xaa is isoleucine, leucine, valine, phenylalanine, methionine, or an amino acid residue which is covalently linked to another amino acid residue of the sequence
  MISC_FEATURE (29)..(29): Xaa is glycine, alanine, serine, or an amino acid residue which is covalently linked to another amino acid residue of the sequence
  MISC_FEATURE (30)..(30): Xaa is leucine, isoleucine, valine, phenylalanine, methionine, or an amino acid residue which is covalently linked to another amino acid residue of the sequence
  MISC_FEATURE (31)..(31): Xaa is methionine, valine, leucine, isoleucine, alanine, or an amino acid residue which is covalently linked to another amino acid residue of the sequence
  MISC_FEATURE (32)..(32): Xaa is valine, leucine, isoleucine, alanine, methionine, or an amino acid residue which is covalently linked to another amino acid residue of the sequence
RHDSGYEVHHXXXXXXXXDVGSNKXXXXXXXX

SEQ ID NO: 528 - protein, 31 aa, Artificial Sequence
  synthetic
  MISC_FEATURE (10)..(10): Xaa is glutamine, asparagine, methionine, serine, or an amino acid which is covalently linked to another amino acid residue of the sequence
  MISC_FEATURE (11)..(11): Xaa is lysine, arginine, or an amino acid residue which is covalently linked to another amino acid residue of the sequence
  MISC_FEATURE (12)..(12): Xaa is leucine, isoleucine, valine, phenylalanine, methionine, or an amino acid residue which is covalently linked to another amino acid residue of the sequence
  MISC_FEATURE (13)..(13): Xaa is valine, leucine, isoleucine, alanine, methionine, or an amino acid residue which is covalently linked to another amino acid residue of the sequence
  MISC_FEATURE (14)..(14): Xaa is phenylalanine, tyrosine, valine, leucine, isoleucine, methionine, or an amino acid residue which is covalently linked to another amino acid residue of the sequence
  MISC_FEATURE (15)..(15): Xaa is phenylalanine, tyrosine, valine, leucine, isoleucine, methionine, or an amino acid residue which is covalently linked to another amino acid residue of the sequence
  MISC_FEATURE (16)..(16): Xaa is alanine, valine, glycine, serine, or an amino acid residue which is covalently linked to another amino acid residue of the sequence
  MISC_FEATURE (17)..(17): Xaa is glutamic acid, aspartic acid, or an amino acid residue which is covalently linked to another amino acid residue of the sequence
  MISC_FEATURE (24)..(24): Xaa is glycine, alanine, serine, or an amino acid residue which is covalently linked to another amino acid residue of the sequence
  MISC_FEATURE (25)..(25): Xaa is alanine, valine, glycine, serine, or an amino acid residue which is covalently linked to another amino acid residue of the sequence
  MISC_FEATURE (26)..(26): Xaa is isoleucine, leucine, valine, phenylalanine, methionine, or an amino acid residue which is covalently linked to another amino acid residue of the sequence
  MISC_FEATURE (27)..(27): Xaa is isoleucine, leucine, valine, phenylalanine, methionine, or an amino acid residue which is covalently linked to another amino acid residue of the sequence
  MISC_FEATURE (28)..(28): Xaa is glycine, alanine, serine, or an amino acid residue which is covalently linked to another amino acid residue of the sequence
  MISC_FEATURE (29)..(29): Xaa is leucine, isoleucine, valine, phenylalanine, methionine, or an amino acid residue which is covalently linked to another amino acid residue of the sequence
  MISC_FEATURE (30)..(30): Xaa is methionine, valine, leucine, isoleucine, alanine, or an amino acid residue which is covalently linked to another amino acid residue of the sequence
  MISC_FEATURE (31)..(31): Xaa is valine, leucine, isoleucine, alanine, methionine, or an amino acid residue which is covalently linked to another amino acid residue of the sequence
HDSGYEVHHXXXXXXXXDVGSNKXXXXXXXX

SEQ ID NO: 529 - protein, 30 aa, Artificial Sequence
  synthetic
  MISC_FEATURE (9)..(9): Xaa is glutamine, asparagine, methionine, serine, or an amino acid which is covalently linked to another amino acid residue of the sequence
  MISC_FEATURE (10)..(10): Xaa is lysine, arginine, or an amino acid residue which is covalently linked to another amino acid residue of the sequence
  MISC_FEATURE (11)..(11): Xaa is leucine, isoleucine, valine, phenylalanine, methionine, or an amino acid residue which is covalently linked to another amino acid residue of the sequence
  MISC_FEATURE (12)..(12): Xaa is valine, leucine, isoleucine, alanine, methionine, or an amino acid residue which is covalently linked to another amino acid residue of the sequence
  MISC_FEATURE (13)..(13): Xaa is phenylalanine, tyrosine, valine, leucine, isoleucine, methionine, or an amino acid residue which is covalently linked to another amino acid residue of the sequence
  MISC_FEATURE (14)..(14): Xaa is phenylalanine, tyrosine, valine, leucine, isoleucine, methionine, or an amino acid residue which is covalently linked to another amino acid residue of the sequence
  MISC_FEATURE (15)..(15): Xaa is alanine, valine, glycine, serine, or an amino acid residue which is covalently linked to another amino acid residue of the sequence
  MISC_FEATURE (16)..(16): Xaa is glutamic acid, aspartic acid, or an amino acid residue which is covalently linked to another amino acid residue of the sequence
  MISC_FEATURE (23)..(23): Xaa is glycine, alanine, serine, or an amino acid residue which is covalently linked to another amino acid residue of the sequence
  MISC_FEATURE (24)..(24): Xaa is alanine, valine, glycine, serine, or an amino acid residue which is covalently linked to another amino acid residue of the sequence
  MISC_FEATURE (25)..(25): Xaa is isoleucine, leucine, valine, phenylalanine, methionine, or an amino acid residue which is covalently linked to another amino acid residue of the sequence
  MISC_FEATURE (26)..(26): Xaa is isoleucine, leucine, valine, phenylalanine, methionine, or an amino acid residue which is covalently linked to another amino acid residue of the sequence
  MISC_FEATURE (27)..(27): Xaa is glycine, alanine, serine, or an amino acid residue which is covalently linked to another amino acid residue of the sequence
  MISC_FEATURE (28)..(28): Xaa is leucine, isoleucine, valine, phenylalanine, methionine, or an amino acid residue which is covalently linked to another amino acid residue of the sequence
  MISC_FEATURE (29)..(29): Xaa is methionine, valine, leucine, isoleucine, alanine, or an amino acid residue which is covalently linked to another amino acid residue of the sequence
  MISC_FEATURE (30)..(30): Xaa is valine, leucine, isoleucine, alanine, methionine, or an amino acid residue which is covalently linked to another amino acid residue of the sequence
DSGYEVHHXXXXXXXXDVGSNKXXXXXXXX

SEQ ID NO: 530 - protein, 29 aa, Artificial Sequence
  synthetic
  MISC_FEATURE (8)..(8): Xaa is glutamine, asparagine, methionine, serine, or an amino acid which is covalently linked to another amino acid residue of the sequence
  MISC_FEATURE (9)..(9): Xaa is lysine, arginine, or an amino acid residue which is covalently linked to another amino acid residue of the sequence
  MISC_FEATURE (10)..(10): Xaa is leucine, isoleucine, valine, phenylalanine, methionine, or an amino acid residue which is covalently linked to another amino acid residue of the sequence
  MISC_FEATURE (11)..(11): Xaa is valine, leucine, isoleucine, alanine, methionine, or an amino acid residue which is covalently linked to another amino acid residue of the sequence
  MISC_FEATURE (12)..(12): Xaa is phenylalanine, tyrosine, valine, leucine, isoleucine, methionine, or an amino acid residue which is covalently linked to another amino acid residue of the sequence
  MISC_FEATURE (13)..(13): Xaa is phenylalanine, tyrosine, valine, leucine, isoleucine, methionine, or an amino acid residue which is covalently linked to another amino acid residue of the sequence
  MISC_FEATURE (14)..(14): Xaa is alanine, valine, glycine, serine, or an amino acid residue which is covalently linked to another amino acid residue of the sequence
  MISC_FEATURE (15)..(15): Xaa is glutamic acid, aspartic acid, or an amino acid residue which is covalently linked to another amino acid residue of the sequence
  MISC_FEATURE (22)..(22): Xaa is glycine, alanine, serine, or an amino acid residue which is covalently linked to another amino acid residue of the sequence
  MISC_FEATURE (23)..(23): Xaa is alanine, valine, glycine, serine, or an amino acid residue which is covalently linked to another amino acid residue of the sequence
  MISC_FEATURE (24)..(24): Xaa is isoleucine, leucine, valine, phenylalanine, methionine, or an amino acid residue which is covalently linked to another amino acid residue of the sequence
  MISC_FEATURE (25)..(25): Xaa is isoleucine, leucine, valine, phenylalanine, methionine, or an amino acid residue which is covalently linked to another amino acid residue of the sequence
  MISC_FEATURE (26)..(26): Xaa is glycine, alanine, serine, or an amino acid residue which is covalently linked to another amino acid residue of the sequence
  MISC_FEATURE (27)..(27): Xaa is leucine, isoleucine, valine, phenylalanine, methionine, or an amino acid residue which is covalently linked to another amino acid residue of the sequence
  MISC_FEATURE (28)..(28): Xaa is methionine, valine, leucine, isoleucine, alanine, or an amino acid residue which is covalently linked to another amino acid residue of the sequence
  MISC_FEATURE (29)..(29): Xaa is valine, leucine, isoleucine, alanine, methionine, or an amino acid residue which is covalently linked to another amino acid residue of the sequence
SGYEVHHXXXXXXXXDVGSNKXXXXXXXX

SEQ ID NO: 531 - protein, 28 aa, Artificial Sequence
  synthetic
  MISC_FEATURE (7)..(7): Xaa is glutamine, asparagine, methionine, serine, or an amino acid which is covalently linked to another amino acid residue of the sequence
  MISC_FEATURE (8)..(8): Xaa is lysine, arginine, or an amino acid residue which is covalently linked to another amino acid residue of the sequence
  MISC_FEATURE (9)..(9): Xaa is leucine, isoleucine, valine, phenylalanine, methionine, or an amino acid residue which is covalently linked to another amino acid residue of the sequence
  MISC_FEATURE (10)..(10): Xaa is valine, leucine, isoleucine, alanine, methionine, or an amino acid residue which is covalently linked to another amino acid residue of the sequence
  MISC_FEATURE (11)..(11): Xaa is phenylalanine, tyrosine, valine, leucine, isoleucine, methionine, or an amino acid residue which is covalently linked to another amino acid residue of the sequence
  MISC_FEATURE (12)..(12): Xaa is phenylalanine, tyrosine, valine, leucine, isoleucine, methionine, or an amino acid residue which is covalently linked to another amino acid residue of the sequence
  MISC_FEATURE (13)..(13): Xaa is alanine, valine, glycine, serine, or an amino acid residue which is covalently linked to another amino acid residue of the sequence
  MISC_FEATURE (14)..(14): Xaa is glutamic acid, aspartic acid, or an amino acid residue which is covalently linked to another amino acid residue of the sequence
  MISC_FEATURE (21)..(21): Xaa is glycine, alanine, serine, or an amino acid residue which is covalently linked to another amino acid residue of the sequence
  MISC_FEATURE (22)..(22): Xaa is alanine, valine, glycine, serine, or an amino acid residue which is covalently linked to another amino acid residue of the sequence
  MISC_FEATURE (23)..(23): Xaa is isoleucine, leucine, valine, phenylalanine, methionine, or an amino acid residue which is covalently linked to another amino acid residue of the sequence
  MISC_FEATURE (24)..(24): Xaa is isoleucine, leucine, valine, phenylalanine, methionine, or an amino acid residue which is covalently linked to another amino acid residue of the sequence
  MISC_FEATURE (25)..(25): Xaa is glycine, alanine, serine, or an amino acid residue which is covalently linked to another amino acid residue of the sequence
  MISC_FEATURE (26)..(26): Xaa is leucine, isoleucine, valine, phenylalanine, methionine, or an amino acid residue which is covalently linked to another amino acid residue of the sequence
  MISC_FEATURE (27)..(27): Xaa is methionine, valine, leucine, isoleucine, alanine, or an amino acid residue which is covalently linked to another amino acid residue of the sequence
  MISC_FEATURE (28)..(28): Xaa is valine, leucine, isoleucine, alanine, methionine, or an amino acid residue which is covalently linked to another amino acid residue of the sequence
GYEVHHXXXXXXXXDVGSNKXXXXXXXX

SEQ ID NO: 532 - protein, 27 aa, Artificial Sequence
  synthetic
  MISC_FEATURE (6)..(6): Xaa is glutamine, asparagine, methionine, serine, or an amino acid which is covalently linked to another amino acid residue of the sequence
  MISC_FEATURE (7)..(7): Xaa is lysine, arginine, or an amino acid residue which is covalently linked to another amino acid residue of the sequence
  MISC_FEATURE (8)..(8): Xaa is leucine, isoleucine, valine, phenylalanine, methionine, or an amino acid residue which is covalently linked to another amino acid residue of the sequence
  MISC_FEATURE (9)..(9): Xaa is valine, leucine, isoleucine, alanine, methionine, or an amino acid residue which is covalently linked to another amino acid residue of the sequence
  MISC_FEATURE (10)..(10): Xaa is phenylalanine, tyrosine, valine, leucine, isoleucine, methionine, or an amino acid residue which is covalently linked to another amino acid residue of the sequence
  MISC_FEATURE (11)..(11): Xaa is phenylalanine, tyrosine, valine, leucine, isoleucine, methionine, or an amino acid residue which is covalently linked to another amino acid residue of the sequence
  MISC_FEATURE (12)..(12): Xaa is alanine, valine, glycine, serine, or an amino acid residue which is covalently linked to another amino acid residue of the sequence
  MISC_FEATURE (13)..(13): Xaa is glutamic acid, aspartic acid, or an amino acid residue which is covalently linked to another amino acid residue of the sequence
  MISC_FEATURE (20)..(20): Xaa is glycine, alanine, serine, or an amino acid residue which is covalently linked to another amino acid residue of the sequence
  MISC_FEATURE (21)..(21): Xaa is alanine, valine, glycine, serine, or an amino acid residue which is covalently linked to another amino acid residue of the sequence
  MISC_FEATURE (22)..(22): Xaa is isoleucine, leucine, valine, phenylalanine, methionine, or an amino acid residue which is covalently linked to another amino acid residue of the sequence
  MISC_FEATURE (23)..(23): Xaa is isoleucine, leucine, valine, phenylalanine, methionine, or an amino acid residue which is covalently linked to another amino acid residue of the sequence
  MISC_FEATURE (24)..(24): Xaa is glycine, alanine, serine, or an amino acid residue which is covalently linked to another amino acid residue of the sequence
  MISC_FEATURE (25)..(25): Xaa is leucine, isoleucine, valine, phenylalanine, methionine, or an amino acid residue which is covalently linked to another amino acid residue of the sequence
  MISC_FEATURE (26)..(26): Xaa is methionine, valine, leucine, isoleucine, alanine, or an amino acid residue which is covalently linked to another amino acid residue of the sequence
  MISC_FEATURE (27)..(27): Xaa is valine, leucine, isoleucine, alanine, methionine, or an amino acid residue which is covalently linked to another amino acid residue of the sequence
YEVHHXXXXXXXXDVGSNKXXXXXXXX

SEQ ID NO: 533 - protein, 26 aa, Artificial Sequence
  synthetic
  MISC_FEATURE (5)..(5): Xaa is glutamine, asparagine, methionine, serine, or an amino acid which is covalently linked to another amino acid residue of the sequence
  MISC_FEATURE (6)..(6): Xaa is lysine, arginine, or an amino acid residue which is covalently linked to another amino acid residue of the sequence
  MISC_FEATURE (7)..(7): Xaa is leucine, isoleucine, valine, phenylalanine, methionine, or an amino acid residue which is covalently linked to another amino acid residue of the sequence
  MISC_FEATURE (8)..(8): Xaa is valine, leucine, isoleucine, alanine, methionine, or an amino acid residue which is covalently linked to another amino acid residue of the sequence
  MISC_FEATURE (9)..(9): Xaa is phenylalanine, tyrosine, valine, leucine, isoleucine, methionine, or an amino acid residue which is covalently linked to another amino acid residue of the sequence
  MISC_FEATURE (10)..(10): Xaa is phenylalanine, tyrosine, valine, leucine, isoleucine, methionine, or an amino acid residue which is covalently linked to another amino acid residue of the sequence
  MISC_FEATURE (11)..(11): Xaa is alanine, valine, glycine, serine, or an amino acid residue which is covalently linked to another amino acid residue of the sequence
  MISC_FEATURE (12)..(12): Xaa is glutamic acid, aspartic acid, or an amino acid residue which is covalently linked to another amino acid residue of the sequence
  MISC_FEATURE (19)..(19): Xaa is glycine, alanine, serine, or an amino acid residue which is covalently linked to another amino acid residue of the sequence
  MISC_FEATURE (20)..(20): Xaa is alanine, valine, glycine, serine, or an amino acid residue which is covalently linked to another amino acid residue of the sequence
  MISC_FEATURE (21)..(21): Xaa is isoleucine, leucine, valine, phenylalanine, methionine, or an amino acid residue which is covalently linked to another amino acid residue of the sequence
  MISC_FEATURE (22)..(22): Xaa is isoleucine, leucine, valine, phenylalanine, methionine, or an amino acid residue which is covalently linked to another amino acid residue of the sequence
  MISC_FEATURE (23)..(23): Xaa is glycine, alanine, serine, or an amino acid residue which is covalently linked to another amino acid residue of the sequence
  MISC_FEATURE (24)..(24): Xaa is leucine, isoleucine, valine, phenylalanine, methionine, or an amino acid residue which is covalently linked to another amino acid residue of the sequence
  MISC_FEATURE (25)..(25): Xaa is methionine, valine, leucine, isoleucine, alanine, or an amino acid residue which is covalently linked to another amino acid residue of the sequence
  MISC_FEATURE (26)..(26): Xaa is valine, leucine, isoleucine, alanine, methionine, or an amino acid residue which is covalently linked to another amino acid residue of the sequence
EVHHXXXXXXXXDVGSNKXXXXXXXX

SEQ ID NO: 534 - protein, 25 aa, Artificial Sequence
  synthetic
  MISC_FEATURE (4)..(4): Xaa is glutamine, asparagine, methionine, serine, or an amino acid which is covalently linked to another amino acid residue of the sequence
  MISC_FEATURE (5)..(5): Xaa is lysine, arginine, or an amino acid residue which is covalently linked to another amino acid residue of the sequence
  MISC_FEATURE (6)..(6): Xaa is leucine, isoleucine, valine, phenylalanine, methionine, or an amino acid residue which is covalently linked to another amino acid residue of the sequence
  MISC_FEATURE (7)..(7): Xaa is valine, leucine, isoleucine, alanine, methionine, or an amino acid residue which is covalently linked to another amino acid residue of the sequence
  MISC_FEATURE (8)..(8): Xaa is phenylalanine, tyrosine, valine, leucine, isoleucine, methionine, or an amino acid residue which is covalently linked to another amino acid residue of the sequence
  MISC_FEATURE (9)..(9): Xaa is phenylalanine, tyrosine, valine, leucine, isoleucine, methionine, or an amino acid residue which is covalently linked to another amino acid residue of the sequence
  MISC_FEATURE (10)..(10): Xaa is alanine, valine, glycine, serine, or an amino acid residue which is covalently linked to another amino acid residue of the sequence
  MISC_FEATURE (11)..(11): Xaa is glutamic acid, aspartic acid, or an amino acid residue which is covalently linked to another amino acid residue of the sequence
  MISC_FEATURE (18)..(18): Xaa is glycine, alanine, serine, or an amino acid residue which is covalently linked to another amino acid residue of the sequence
  MISC_FEATURE (19)..(19): Xaa is alanine, valine, glycine, serine, or an amino acid residue which is covalently linked to another amino acid residue of the sequence
  MISC_FEATURE (20)..(20): Xaa is isoleucine, leucine, valine, phenylalanine, methionine, or an amino acid residue which is covalently linked to another amino acid residue of the sequence
  MISC_FEATURE (21)..(21): Xaa is isoleucine, leucine, valine, phenylalanine, methionine, or an amino acid residue which is covalently linked to another amino acid residue of the sequence
  MISC_FEATURE (22)..(22): Xaa is glycine, alanine, serine, or an amino acid residue which is covalently linked to another amino acid residue of the sequence
  MISC_FEATURE (23)..(23): Xaa is leucine, isoleucine, valine, phenylalanine, methionine, or an amino acid residue which is covalently linked to another amino acid residue of the sequence
  MISC_FEATURE (24)..(24): Xaa is methionine, valine, leucine, isoleucine, alanine, or an amino acid residue which is covalently linked to another amino acid residue of the sequence
  MISC_FEATURE (25)..(25): Xaa is valine, leucine, isoleucine, alanine, methionine, or an amino acid residue which is covalently linked to another amino acid residue of the sequence
VHHXXXXXXXXDVGSNKXXXXXXXX

SEQ ID NO: 535 - protein, 24 aa, Artificial Sequence
  synthetic
  MISC_FEATURE (3)..(3): Xaa is glutamine, asparagine, methionine, serine, or an amino acid which is covalently linked to another amino acid residue of the sequence
  MISC_FEATURE (4)..(4): Xaa is lysine, arginine, or an amino acid residue which is covalently linked to another amino acid residue of the sequence
  MISC_FEATURE (5)..(5): Xaa is leucine, isoleucine, valine, phenylalanine, methionine, or an amino acid residue which is covalently linked to another amino acid residue of the sequence
  MISC_FEATURE (6)..(6): Xaa is valine, leucine, isoleucine, alanine, methionine, or an amino acid residue which is covalently linked to another amino acid residue of the sequence
  MISC_FEATURE (7)..(7): Xaa is phenylalanine, tyrosine, valine, leucine, isoleucine, methionine, or an amino acid residue which is covalently linked to another amino acid residue of the sequence
  MISC_FEATURE (8)..(8): Xaa is phenylalanine, tyrosine, valine, leucine, isoleucine, methionine, or an amino acid residue which is covalently linked to another amino acid residue of the sequence
  MISC_FEATURE (9)..(9): Xaa is alanine, valine, glycine, serine, or an amino acid residue which is covalently linked to another amino acid residue of the sequence
  MISC_FEATURE (10)..(10): Xaa is glutamic acid, aspartic acid, or an amino acid residue which is covalently linked to another amino acid residue of the sequence
  MISC_FEATURE (17)..(17): Xaa is glycine, alanine, serine, or an amino acid residue which is covalently linked to another amino acid residue of the sequence
  MISC_FEATURE (18)..(18): Xaa is alanine, valine, glycine, serine, or an amino acid residue which is covalently linked to another amino acid residue of the sequence
  MISC_FEATURE (19)..(19): Xaa is isoleucine, leucine, valine, phenylalanine, methionine, or an amino acid residue which is covalently linked to another amino acid residue of the sequence
  MISC_FEATURE (20)..(20): Xaa is isoleucine, leucine, valine, phenylalanine, methionine, or an amino acid residue which is covalently linked to another amino acid residue of the sequence
  MISC_FEATURE (21)..(21): Xaa is glycine, alanine, serine, or an amino acid residue which is covalently linked to another amino acid residue of the sequence
  MISC_FEATURE (22)..(22): Xaa is leucine, isoleucine, valine, phenylalanine, methionine, or an amino acid residue which is covalently linked to another amino acid residue of the sequence
  MISC_FEATURE (23)..(23): Xaa is methionine, valine, leucine, isoleucine, alanine, or an amino acid residue which is covalently linked to another amino acid residue of the sequence
  MISC_FEATURE (24)..(24): Xaa is valine, leucine, isoleucine, alanine, methionine, or an amino acid residue which is covalently linked to another amino acid residue of the sequence
HHXXXXXXXXDVGSNKXXXXXXXX

SEQ ID NO: 536 - protein, 23 aa, Artificial Sequence
  synthetic
  MISC_FEATURE (2)..(2): Xaa is glutamine, asparagine, methionine, serine, or an amino acid which is covalently linked to another amino acid residue of the sequence
  MISC_FEATURE (3)..(3): Xaa is lysine, arginine, or an amino acid residue which is covalently linked to another amino acid residue of the sequence
  MISC_FEATURE (4)..(4): Xaa is leucine, isoleucine, valine, phenylalanine, methionine, or an amino acid residue which is covalently linked to another amino acid residue of the sequence
  MISC_FEATURE (5)..(5): Xaa is valine, leucine, isoleucine, alanine, methionine, or an amino acid residue which is covalently linked to another amino acid residue of the sequence
  MISC_FEATURE (6)..(6): Xaa is phenylalanine, tyrosine, valine, leucine, isoleucine, methionine, or an amino acid residue which is covalently linked to another amino acid residue of the sequence
  MISC_FEATURE (7)..(7): Xaa is phenylalanine, tyrosine, valine, leucine, isoleucine, methionine, or an amino acid residue which is covalently linked to another amino acid residue of the sequence
  MISC_FEATURE (8)..(8): Xaa is alanine, valine, glycine, serine, or an amino acid residue which is covalently linked to another amino acid residue of the sequence
  MISC_FEATURE (9)..(9): Xaa is glutamic acid, aspartic acid, or an amino acid residue which is covalently linked to another amino acid residue of the sequence
  MISC_FEATURE (16)..(16): Xaa is glycine, alanine, serine, or an amino acid residue which is covalently linked to another amino acid residue of the sequence
  MISC_FEATURE (17)..(17): Xaa is alanine, valine, glycine, serine, or an amino acid residue which is covalently linked to another amino acid residue of the sequence
  MISC_FEATURE (18)..(18): Xaa is isoleucine, leucine, valine, phenylalanine, methionine, or an amino acid residue which is covalently linked to another amino acid residue of the sequence
  MISC_FEATURE (19)..(19): Xaa is isoleucine, leucine, valine, phenylalanine, methionine, or an amino acid residue which is covalently linked to another amino acid residue of the sequence
  MISC_FEATURE (20)..(20): Xaa is glycine, alanine, serine, or an amino acid residue which is covalently linked to another amino acid residue of the sequence
  MISC_FEATURE (21)..(21): Xaa is leucine, isoleucine, valine, phenylalanine, methionine, or an amino acid residue which is covalently linked to another amino acid residue of the sequence
  MISC_FEATURE (22)..(22): Xaa is methionine, valine, leucine, isoleucine, alanine, or an amino acid residue which is covalently linked to another amino acid residue of the sequence
  MISC_FEATURE (23)..(23): Xaa is valine, leucine, isoleucine, alanine, methionine, or an amino acid residue which is covalently linked to another amino acid residue of the sequence
HXXXXXXXXDVGSNKXXXXXXXX

SEQ ID NO: 537 - protein, 22 aa, Artificial Sequence
  synthetic
  MISC_FEATURE (1)..(1): Xaa is glutamine, asparagine, methionine, serine, or an amino acid which is covalently linked to another amino acid residue of the sequence
  MISC_FEATURE (2)..(2): Xaa is lysine, arginine, or an amino acid residue which is covalently linked to another amino acid residue of the sequence
  MISC_FEATURE (3)..(3): Xaa is leucine, isoleucine, valine, phenylalanine, methionine, or an amino acid residue which is covalently linked to another amino acid residue of the sequence
  MISC_FEATURE (4)..(4): Xaa is valine, leucine, isoleucine, alanine, methionine, or an amino acid residue which is covalently linked to another amino acid residue of the sequence
  MISC_FEATURE (5)..(5): Xaa is phenylalanine, tyrosine, valine, leucine, isoleucine, methionine, or an amino acid residue which is covalently linked to another amino acid residue of the sequence
  MISC_FEATURE (6)..(6): Xaa is phenylalanine, tyrosine, valine, leucine, isoleucine, methionine, or an amino acid residue which is covalently linked to another amino acid residue of the sequence
  MISC_FEATURE (7)..(7): Xaa is alanine, valine, glycine, serine, or an amino acid residue which is covalently linked to another amino acid residue of the sequence
  MISC_FEATURE (8)..(8): Xaa is glutamic acid, aspartic acid, or an amino acid residue which is covalently linked to another amino acid residue of the sequence
  MISC_FEATURE (15)..(15): Xaa is glycine, alanine, serine, or an amino acid residue which is covalently linked to another amino acid residue of the sequence
  MISC_FEATURE (16)..(16): Xaa is alanine, valine, glycine, serine, or an amino acid residue which is covalently linked to another amino acid residue of the sequence
  MISC_FEATURE (17)..(17): Xaa is isoleucine, leucine, valine, phenylalanine, methionine, or an amino acid residue which is covalently linked to another amino acid residue of the sequence
  MISC_FEATURE (18)..(18): Xaa is isoleucine, leucine, valine, phenylalanine, methionine, or an amino acid residue which is covalently linked to another amino acid residue of the sequence
  MISC_FEATURE (19)..(19): Xaa is glycine, alanine, serine, or an amino acid residue which is covalently linked to another amino acid residue of the sequence
  MISC_FEATURE (20)..(20): Xaa is leucine, isoleucine, valine, phenylalanine, methionine, or an amino acid residue which is covalently linked to another amino acid residue of the sequence
  MISC_FEATURE (21)..(21): Xaa is methionine, valine, leucine, isoleucine, alanine, or an amino acid residue which is covalently linked to another amino acid residue of the sequence
  MISC_FEATURE (22)..(22): Xaa is valine, leucine, isoleucine, alanine, methionine, or an amino acid residue which is covalently linked to another amino acid residue of the sequence
XXXXXXXXDVGSNKXXXXXXXX

SEQ ID NO: 538 - protein, 21 aa, Artificial Sequence
  synthetic
  MISC_FEATURE (1)..(1): Xaa is lysine, arginine, or an amino acid residue which is covalently linked to another amino acid residue of the sequence
  MISC_FEATURE (2)..(2): Xaa is leucine, isoleucine, valine, phenylalanine, methionine, or an amino acid residue which is covalently linked to another amino acid residue of the sequence
  MISC_FEATURE (3)..(3): Xaa is valine, leucine, isoleucine, alanine, methionine, or an amino acid residue which is covalently linked to another amino acid residue of the sequence
  MISC_FEATURE (4)..(4): Xaa is phenylalanine, tyrosine, valine, leucine, isoleucine, methionine, or an amino acid residue which is covalently linked to another amino acid residue of the sequence
  MISC_FEATURE (5)..(5): Xaa is phenylalanine, tyrosine, valine, leucine, isoleucine, methionine, or an amino acid residue which is covalently linked to another amino acid residue of the sequence
  MISC_FEATURE (6)..(6): Xaa is alanine, valine, glycine, serine, or an amino acid residue which is covalently linked to another amino acid residue of the sequence
  MISC_FEATURE (7)..(7): Xaa is glutamic acid, aspartic acid, or an amino acid residue which is covalently linked to another amino acid residue of the sequence
  MISC_FEATURE (14)..(14): Xaa is glycine, alanine, serine, or an amino acid residue which is covalently linked to another amino acid residue of the sequence
  MISC_FEATURE (15)..(15): Xaa is alanine, valine, glycine, serine, or an amino acid residue which is covalently linked to another amino acid residue of the sequence
  MISC_FEATURE (16)..(16): Xaa is isoleucine, leucine, valine, phenylalanine, methionine, or an amino acid residue which is covalently linked to another amino acid residue of the sequence
  MISC_FEATURE (17)..(17): Xaa is isoleucine, leucine, valine, phenylalanine, methionine, or an amino acid residue which is covalently linked to another amino acid residue of the sequence
  MISC_FEATURE (18)..(18): Xaa is glycine, alanine, serine, or an amino acid residue which is covalently linked to another amino acid residue of the sequence
  MISC_FEATURE (19)..(19): Xaa is leucine, isoleucine, valine, phenylalanine, methionine, or an amino acid residue which is covalently linked to another amino acid residue of the sequence
  MISC_FEATURE (20)..(20): Xaa is methionine, valine, leucine, isoleucine, alanine, or an amino acid residue which is covalently linked to another amino acid residue of the sequence
XXXXXXXDVGSNKXXXXXXXV

SEQ ID NO: 539 - protein, 20 aa, Artificial Sequence
  synthetic
  MISC_FEATURE (1)..(1): Xaa is leucine, isoleucine, valine, phenylalanine, methionine, or an amino acid residue which is covalently linked to another amino acid residue of the sequence
  MISC_FEATURE (2)..(2): Xaa is valine, leucine, isoleucine, alanine, methionine, or an amino acid residue which is covalently linked to another amino acid residue of the sequence
  MISC_FEATURE (3)..(3): Xaa is phenylalanine, tyrosine, valine, leucine, isoleucine, methionine, or an amino acid residue which is covalently linked to another amino acid residue of the sequence
  MISC_FEATURE (4)..(4): Xaa is phenylalanine, tyrosine, valine, leucine, isoleucine, methionine, or an amino acid residue which is covalently linked to another amino acid residue of the sequence
  MISC_FEATURE (5)..(5): Xaa is alanine, valine, glycine, serine, or an amino acid residue which is covalently linked to another amino acid residue of the sequence
  MISC_FEATURE (6)..(6): Xaa is glutamic acid, aspartic acid, or an amino acid residue which is covalently linked to another amino acid residue of the sequence
  MISC_FEATURE (13)..(13): Xaa is glycine, alanine, serine, or an amino acid residue which is covalently linked to another amino acid residue of the sequence
  MISC_FEATURE (14)..(14): Xaa is alanine, valine, glycine, serine, or an amino acid residue which is covalently linked to another amino acid residue of the sequence
  MISC_FEATURE (15)..(15): Xaa is isoleucine, leucine, valine, phenylalanine, methionine, or an amino acid residue which is covalently linked to another amino acid residue of the sequence
  MISC_FEATURE (16)..(16): Xaa is isoleucine, leucine, valine, phenylalanine, methionine, or an amino acid residue which is covalently linked to another amino acid residue of the sequence
  MISC_FEATURE (17)..(17): Xaa is glycine, alanine, serine, or an amino acid residue which is covalently linked to another amino acid residue of the sequence
  MISC_FEATURE (18)..(18): Xaa is leucine, isoleucine, valine, phenylalanine, methionine, or an amino acid residue which is covalently linked to another amino acid residue of the sequence
XXXXXXDVGSNKXXXXXXMV

SEQ ID NO: 540 - protein, 19 aa, Artificial Sequence
  synthetic
  MISC_FEATURE (1)..(1): Xaa is valine, leucine, isoleucine, alanine, methionine, or an amino acid residue which is covalently linked to another amino acid residue of the sequence
  MISC_FEATURE (2)..(2): Xaa is phenylalanine, tyrosine, valine, leucine, isoleucine, methionine, or an amino acid residue which is covalently linked to another amino acid residue of the sequence
  MISC_FEATURE (3)..(3): Xaa is phenylalanine, tyrosine, valine, leucine, isoleucine, methionine, or an amino acid residue which is covalently linked to another amino acid residue of the sequence
  MISC_FEATURE (4)..(4): Xaa is alanine, valine, glycine, serine, or an amino acid residue which is covalently linked to another amino acid residue of the sequence
  MISC_FEATURE (5)..(5): Xaa is glutamic acid, aspartic acid, or an amino acid residue which is covalently linked to another amino acid residue of the sequence
  MISC_FEATURE (12)..(12): Xaa is glycine, alanine, serine, or an amino acid residue which is covalently linked to another amino acid residue of the sequence
  MISC_FEATURE (13)..(13): Xaa is alanine, valine, glycine, serine, or an amino acid residue which is covalently linked to another amino acid residue of the sequence
  MISC_FEATURE (14)..(14): Xaa is isoleucine, leucine, valine, phenylalanine, methionine, or an amino acid residue which is covalently linked to another amino acid residue of the sequence
  MISC_FEATURE (15)..(15): Xaa is isoleucine, leucine, valine, phenylalanine, methionine, or an amino acid residue which is covalently linked to another amino acid residue of the sequence
  MISC_FEATURE (16)..(16): Xaa is glycine, alanine, serine, or an amino acid residue which is covalently linked to another amino acid residue of the sequence
XXXXXDVGSNKXXXXXLMV

SEQ ID NO: 541 - protein, 18 aa, Artificial Sequence
  synthetic
  MISC_FEATURE (1)..(1): Xaa is phenylalanine, tyrosine, valine, leucine, isoleucine, methionine, or an amino acid residue which is covalently linked to another amino acid residue of the sequence
  MISC_FEATURE (2)..(2): Xaa is phenylalanine, tyrosine, valine, leucine, isoleucine, methionine, or an amino acid residue which is covalently linked to another amino acid residue of the sequence
  MISC_FEATURE (3)..(3): Xaa is alanine, valine, glycine, serine, or an amino acid residue which is covalently linked to another amino acid residue of the sequence
  MISC_FEATURE (4)..(4): Xaa is glutamic acid, aspartic acid, or an amino acid residue which is covalently linked to another amino acid residue of the sequence
  MISC_FEATURE (11)..(11): Xaa is glycine, alanine, serine, or an amino acid residue which is covalently linked to another amino acid residue of the sequence
  MISC_FEATURE (12)..(12): Xaa is alanine, valine, glycine, serine, or an amino acid residue which is covalently linked to another amino acid residue of the sequence
  MISC_FEATURE (13)..(13): Xaa is isoleucine, leucine, valine, phenylalanine, methionine, or an amino acid residue which is covalently linked to another amino acid residue of the sequence
  MISC_FEATURE (14)..(14): Xaa is isoleucine, leucine, valine, phenylalanine, methionine, or an amino acid residue which is covalently linked to another amino acid residue of the sequence
XXXXDVGSNKXXXXGLMV

SEQ ID NO: 542 - protein, 17 aa, Artificial Sequence
  synthetic
  MISC_FEATURE (1)..(1): Xaa is phenylalanine, tyrosine, valine, leucine, isoleucine, methionine, or an amino acid residue which is covalently linked to another amino acid residue of the sequence
  MISC_FEATURE (2)..(2): Xaa is alanine, valine, glycine, serine, or an amino acid residue which is covalently linked to another amino acid residue of the sequence
  MISC_FEATURE (3)..(3): Xaa is glutamic acid, aspartic acid, or an amino acid residue which is covalently linked to another amino acid residue of the sequence
  MISC_FEATURE (10)..(10): Xaa is glycine, alanine, serine, or an amino acid residue which is covalently linked to another amino acid residue of the sequence
  MISC_FEATURE (11)..(11): Xaa is alanine, valine, glycine, serine, or an amino acid residue which is covalently linked to another amino acid residue of the sequence
  MISC_FEATURE (12)..(12): Xaa is isoleucine, leucine, valine, phenylalanine, methionine, or an amino acid residue which is covalently linked to another amino acid residue of the sequence
XXXDVGSNKXXXIGLMV

SEQ ID NO: 543 - protein, 16 aa, Artificial Sequence
  synthetic
  MISC_FEATURE (1)..(1): Xaa is alanine, valine, glycine, serine, or an amino acid residue which is covalently linked to another amino acid residue of the sequence
  MISC_FEATURE (2)..(2): Xaa is glutamic acid, aspartic acid, or an amino acid residue which is covalently linked to another amino acid residue of the sequence
  MISC_FEATURE (9)..(9): Xaa is glycine, alanine, serine, or an amino acid residue which is covalently linked to another amino acid residue of the sequence
  MISC_FEATURE (10)..(10): Xaa is alanine, valine, glycine, serine, or an amino acid residue which is covalently linked to another amino acid residue of the sequence
XXDVGSNKXXIIGLMV

SEQ ID NO: 544 - protein, 15 aa, Artificial Sequence
  synthetic
  MISC_FEATURE (1)..(1): Xaa is alanine, valine, glycine, serine, or an amino acid residue which is covalently linked to another amino acid residue of the sequence
  MISC_FEATURE (8)..(8): Xaa is glutamic acid, aspartic acid, or an amino acid residue which is covalently linked to another amino acid residue of the sequence
XDVGSNKXAIIGLMV

SEQ ID NO: 545 - protein, 35 aa, Artificial Sequence
  synthetic
  MISC_FEATURE (16)..(16): Xaa is lysine, arginine, or an amino acid residue which is covalently linked to another amino acid residue of the sequence
  MISC_FEATURE (17)..(17): Xaa is leucine, isoleucine, valine, phenylalanine, methionine, or an amino acid residue which is covalently linked to another amino acid residue of the sequence
  MISC_FEATURE (18)..(18): Xaa is valine, leucine, isoleucine, alanine, methionine, or an amino acid residue which is covalently linked to another amino acid residue of the sequence
  MISC_FEATURE (19)..(19): Xaa is phenylalanine, tyrosine, valine, leucine, isoleucine, methionine, or an amino acid residue which is covalently linked to another amino acid residue of the sequence
  MISC_FEATURE (20)..(20): Xaa is phenylalanine, tyrosine, valine, leucine, isoleucine, methionine, or an amino acid residue which is covalently linked to another amino acid residue of the sequence
  MISC_FEATURE (21)..(21): Xaa is alanine, valine, glycine, serine, or an amino acid residue which is covalently linked to another amino acid residue of the sequence
  MISC_FEATURE (22)..(22): Xaa is glutamic acid, aspartic acid, or an amino acid residue which is covalently linked to another amino acid residue of the sequence
  MISC_FEATURE (29)..(29): Xaa is glycine, alanine, serine, or an amino acid residue which is covalently linked to another amino acid residue of the sequence
  MISC_FEATURE (30)..(30): Xaa is alanine, valine, glycine, serine, or an amino acid residue which is covalently linked to another amino acid residue of the sequence
  MISC_FEATURE (31)..(31): Xaa is isoleucine, leucine, valine, phenylalanine, methionine, or an amino acid residue which is covalently linked to another amino acid residue of the sequence
  MISC_FEATURE (32)..(32): Xaa is isoleucine, leucine, valine, phenylalanine, methionine, or an amino acid residue which is covalently linked to another amino acid residue of the sequence
  MISC_FEATURE (33)..(33): Xaa is glycine, alanine, serine, or an amino acid residue which is covalently linked to another amino acid residue of the sequence
  MISC_FEATURE (34)..(34): Xaa is leucine, isoleucine, valine, phenylalanine, methionine, or an amino acid residue which is covalently linked to another amino acid residue of the sequence
  MISC_FEATURE (35)..(35): Xaa is methionine, valine, leucine, isoleucine, alanine, or an amino acid residue which is covalently linked to another amino acid residue of the sequence
DAEFRHDSGYEVHHQXXXXXXXDVGSNKXXXXXXX

SEQ ID NO: 546 - protein, 34 aa, Artificial Sequence
  synthetic
  MISC_FEATURE (15)..(15): Xaa is lysine, arginine, or an amino acid residue which is covalently linked to another amino acid residue of the sequence
  MISC_FEATURE (16)..(16): Xaa is leucine, isoleucine, valine, phenylalanine, methionine, or an amino acid residue which is covalently linked to another amino acid residue of the sequence
  MISC_FEATURE (17)..(17): Xaa is valine, leucine, isoleucine, alanine, methionine, or an amino acid residue which is covalently linked to another amino acid residue of the sequence
  MISC_FEATURE (18)..(18): Xaa is phenylalanine, tyrosine, valine, leucine, isoleucine, methionine, or an amino acid residue which is covalently linked to another amino acid residue of the sequence
  MISC_FEATURE (19)..(19): Xaa is phenylalanine, tyrosine, valine, leucine, isoleucine, methionine, or an amino acid residue which is covalently linked to another amino acid residue of the sequence
  MISC_FEATURE (20)..(20): Xaa is alanine, valine, glycine, serine, or an amino acid residue which is covalently linked to another amino acid residue of the sequence
  MISC_FEATURE (21)..(21): Xaa is glutamic acid, aspartic acid, or an amino acid residue which is covalently linked to another amino acid residue of the sequence
  MISC_FEATURE (28)..(28): Xaa is glycine, alanine, serine, or an amino acid residue which is covalently linked to another amino acid residue of the sequence
  MISC_FEATURE (29)..(29): Xaa is alanine, valine, glycine, serine, or an amino acid residue which is covalently linked to another amino acid residue of the sequence
  MISC_FEATURE (30)..(30): Xaa is isoleucine, leucine, valine, phenylalanine, methionine, or an amino acid residue which is covalently linked to another amino acid residue of the sequence
  MISC_FEATURE (31)..(31): Xaa is isoleucine, leucine, valine, phenylalanine, methionine, or an amino acid residue which is covalently linked to another amino acid residue of the sequence
  MISC_FEATURE (32)..(32): Xaa is glycine, alanine, serine, or an amino acid residue which is covalently linked to another amino acid residue of the sequence
  MISC_FEATURE (33)..(33): Xaa is leucine, isoleucine, valine, phenylalanine, methionine, or an amino acid residue which is covalently linked to another amino acid residue of the sequence
  MISC_FEATURE (34)..(34): Xaa is methionine, valine, leucine, isoleucine, alanine, or an amino acid residue which is covalently linked to another amino acid residue of the sequence
AEFRHDSGYEVHHQXXXXXXXDVGSNKXXXXXXX

SEQ ID NO: 547 - protein, 33 aa, Artificial Sequence
  synthetic
  MISC_FEATURE (14)..(14): Xaa is lysine, arginine, or an amino acid residue which is covalently linked to another amino acid residue of the sequence
  MISC_FEATURE (15)..(15): Xaa is leucine, isoleucine, valine, phenylalanine, methionine, or an amino acid residue which is covalently linked to another amino acid residue of the sequence
  MISC_FEATURE (16)..(16): Xaa is valine, leucine, isoleucine, alanine, methionine, or an amino acid residue which is covalently linked to another amino acid residue of the sequence
  MISC_FEATURE (17)..(17): Xaa is phenylalanine, tyrosine, valine, leucine, isoleucine, methionine, or an amino acid residue which is covalently linked to another amino acid residue of the sequence
  MISC_FEATURE (18)..(18): Xaa is phenylalanine, tyrosine, valine, leucine, isoleucine, methionine, or an amino acid residue which is covalently linked to another amino acid residue of the sequence
  MISC_FEATURE (19)..(19): Xaa is alanine, valine, glycine, serine, or an amino acid residue which is covalently linked to another amino acid residue of the sequence
  MISC_FEATURE (20)..(20): Xaa is glutamic acid, aspartic acid, or an amino acid residue which is covalently linked to another amino acid residue of the sequence
  MISC_FEATURE (27)..(27): Xaa is glycine, alanine, serine, or an amino acid residue which is covalently linked to another amino acid residue of the sequence
  MISC_FEATURE (28)..(28): Xaa is alanine, valine, glycine, serine, or an amino acid residue which is covalently linked to another amino acid residue of the sequence
  MISC_FEATURE (29)..(29): Xaa is isoleucine, leucine, valine, phenylalanine, methionine, or an amino acid residue which is covalently linked to another amino acid residue of the sequence
  MISC_FEATURE (30)..(30): Xaa is isoleucine, leucine, valine, phenylalanine, methionine, or an amino acid residue which is covalently linked to another amino acid residue of the sequence
  MISC_FEATURE (31)..(31): Xaa is glycine, alanine, serine, or an amino acid residue which is covalently linked to another amino acid residue of the sequence
  MISC_FEATURE (32)..(32): Xaa is leucine, isoleucine, valine, phenylalanine, methionine, or an amino acid residue which is covalently linked to another amino acid residue of the sequence
  MISC_FEATURE (33)..(33): Xaa is methionine, valine, leucine, isoleucine, alanine, or an amino acid residue which is covalently linked to another amino acid residue of the sequence
EFRHDSGYEVHHQXXXXXXXDVGSNKXXXXXXX

SEQ ID NO: 548 - protein, 32 aa, Artificial Sequence
  synthetic
  MISC_FEATURE (13)..(13): Xaa is lysine, arginine, or an amino acid residue which is covalently linked to another amino acid residue of the sequence
  MISC_FEATURE (14)..(14): Xaa is leucine, isoleucine, valine, phenylalanine, methionine, or an amino acid residue which is covalently linked to another amino acid residue of the sequence
  MISC_FEATURE (15)..(15): Xaa is valine, leucine, isoleucine, alanine, methionine, or an amino acid residue which is covalently linked to another amino acid residue of the sequence
  MISC_FEATURE (16)..(16): Xaa is phenylalanine, tyrosine, valine, leucine, isoleucine, methionine, or an amino acid residue which is covalently linked to another amino acid residue of the sequence
  MISC_FEATURE (17)..(17): Xaa is phenylalanine, tyrosine, valine, leucine, isoleucine, methionine, or an amino acid residue which is covalently linked to another amino acid residue of the sequence
  MISC_FEATURE (18)..(18): Xaa is alanine, valine, glycine, serine, or an amino acid residue which is covalently linked to another amino acid residue of the sequence
  MISC_FEATURE (19)..(19): Xaa is glutamic acid, aspartic acid, or an amino acid residue which is covalently linked to another amino acid residue of the sequence
  MISC_FEATURE (26)..(26): Xaa is glycine, alanine, serine, or an amino acid residue which is covalently linked to another amino acid residue of the sequence
  MISC_FEATURE (27)..(27): Xaa is alanine, valine, glycine, serine, or an amino acid residue which is covalently linked to another amino acid residue of the sequence
  MISC_FEATURE (28)..(28): Xaa is isoleucine, leucine, valine, phenylalanine, methionine, or an amino acid residue which is covalently linked to another amino acid residue of the sequence
  MISC_FEATURE (29)..(29): Xaa is isoleucine, leucine, valine, phenylalanine, methionine, or an amino acid residue which is covalently linked to another amino acid residue of the sequence
  MISC_FEATURE (30)..(30): Xaa is glycine, alanine, serine, or an amino acid residue which is covalently linked to another amino acid residue of the sequence
  MISC_FEATURE (31)..(31): Xaa is leucine, isoleucine, valine, phenylalanine, methionine, or an amino acid residue which is covalently linked to another amino acid residue of the sequence
  MISC_FEATURE (32)..(32): Xaa is methionine, valine, leucine, isoleucine, alanine, or an amino acid residue which is covalently linked to another amino acid residue of the sequence
FRHDSGYEVHHQXXXXXXXDVGSNKXXXXXXX

SEQ ID NO: 549 - protein, 31 aa, Artificial Sequence
  synthetic
  MISC_FEATURE (12)..(12): Xaa is lysine, arginine, or an amino acid residue which is covalently linked to another amino acid residue of the sequence
  MISC_FEATURE (13)..(13): Xaa is leucine, isoleucine, valine, phenylalanine, methionine, or an amino acid residue which is covalently linked to another amino acid residue of the sequence
  MISC_FEATURE (14)..(14): Xaa is valine, leucine, isoleucine, alanine, methionine, or an amino acid residue which is covalently linked to another amino acid residue of the sequence
  MISC_FEATURE (15)..(15): Xaa is phenylalanine, tyrosine, valine, leucine, isoleucine, methionine, or an amino acid residue which is covalently linked to another amino acid residue of the sequence
  MISC_FEATURE (16)..(16): Xaa is phenylalanine, tyrosine, valine, leucine, isoleucine, methionine, or an amino acid residue which is covalently linked to another amino acid residue of the sequence
  MISC_FEATURE (17)..(17): Xaa is alanine, valine, glycine, serine, or an amino acid residue which is covalently linked to another amino acid residue of the sequence
  MISC_FEATURE (18)..(18): Xaa is glutamic acid, aspartic acid, or an amino acid residue which is covalently linked to another amino acid residue of the sequence
  MISC_FEATURE (25)..(25): Xaa is glycine, alanine, serine, or an amino acid residue which is covalently linked to another amino acid residue of the sequence
  MISC_FEATURE (26)..(26): Xaa is alanine, valine, glycine, serine, or an amino acid residue which is covalently linked to another amino acid residue of the sequence
  MISC_FEATURE (27)..(27): Xaa is isoleucine, leucine, valine, phenylalanine, methionine, or an amino acid residue which is covalently linked to another amino acid residue of the sequence
  MISC_FEATURE (28)..(28): Xaa is isoleucine, leucine, valine, phenylalanine, methionine, or an amino acid residue which is covalently linked to another amino acid residue of the sequence
  MISC_FEATURE (29)..(29): Xaa is glycine, alanine, serine, or an amino acid residue which is covalently linked to another amino acid residue of the sequence
  MISC_FEATURE (30)..(30): Xaa is leucine, isoleucine, valine, phenylalanine, methionine, or an amino acid residue which is covalently linked to another amino acid residue of the sequence
  MISC_FEATURE (31)..(31): Xaa is methionine, valine, leucine, isoleucine, alanine, or an amino acid residue which is covalently linked to another amino acid residue of the sequence
RHDSGYEVHHQXXXXXXXDVGSNKXXXXXXX

SEQ ID NO: 550 - protein, 30 aa, Artificial Sequence
  synthetic
  MISC_FEATURE (11)..(11): Xaa is lysine, arginine, or an amino acid residue which is covalently linked to another amino acid residue of the sequence
  MISC_FEATURE (12)..(12): Xaa is leucine, isoleucine, valine, phenylalanine, methionine, or an amino acid residue which is covalently linked to another amino acid residue of the sequence
  MISC_FEATURE (13)..(13): Xaa is valine, leucine, isoleucine, alanine, methionine, or an amino acid residue which is covalently linked to another amino acid residue of the sequence
  MISC_FEATURE (14)..(14): Xaa is phenylalanine, tyrosine, valine, leucine, isoleucine, methionine, or an amino acid residue which is covalently linked to another amino acid residue of the sequence
  MISC_FEATURE (15)..(15): Xaa is phenylalanine, tyrosine, valine, leucine, isoleucine, methionine, or an amino acid residue which is covalently linked to another amino acid residue of the sequence
  MISC_FEATURE (16)..(16): Xaa is alanine, valine, glycine, serine, or an amino acid residue which is covalently linked to another amino acid residue of the sequence
  MISC_FEATURE (17)..(17): Xaa is glutamic acid, aspartic acid, or an amino acid residue which is covalently linked to another amino acid residue of the sequence
  MISC_FEATURE (24)..(24): Xaa is glycine, alanine, serine, or an amino acid residue which is covalently linked to another amino acid residue of the sequence
  MISC_FEATURE (25)..(25): Xaa is alanine, valine, glycine, serine, or an amino acid residue which is covalently linked to another amino acid residue of the sequence
  MISC_FEATURE (26)..(26): Xaa is isoleucine, leucine, valine, phenylalanine, methionine, or an amino acid residue which is covalently linked to another amino acid residue of the sequence
  MISC_FEATURE (27)..(27): Xaa is isoleucine, leucine, valine, phenylalanine, methionine, or an amino acid residue which is covalently linked to another amino acid residue of the sequence
  MISC_FEATURE (28)..(28): Xaa is glycine, alanine, serine, or an amino acid residue which is covalently linked to another amino acid residue of the sequence
  MISC_FEATURE (29)..(29): Xaa is leucine, isoleucine, valine, phenylalanine, methionine, or an amino acid residue which is covalently linked to another amino acid residue of the sequence
  MISC_FEATURE (30)..(30): Xaa is methionine, valine, leucine, isoleucine, alanine, or an amino acid residue which is covalently linked to another amino acid residue of the sequence
HDSGYEVHHQXXXXXXXDVGSNKXXXXXXX

SEQ ID NO: 551 - protein, 29 aa, Artificial Sequence
  synthetic
  MISC_FEATURE (10)..(10): Xaa is lysine, arginine, or an amino acid residue which is covalently linked to another amino acid residue of the sequence
  MISC_FEATURE (11)..(11): Xaa is leucine, isoleucine, valine, phenylalanine, methionine, or an amino acid residue which is covalently linked to another amino acid residue of the sequence
  MISC_FEATURE (12)..(12): Xaa is valine, leucine, isoleucine, alanine, methionine, or an amino acid residue which is covalently linked to another amino acid residue of the sequence
  MISC_FEATURE (13)..(13): Xaa is phenylalanine, tyrosine, valine, leucine, isoleucine, methionine, or an amino acid residue which is covalently linked to another amino acid residue of the sequence
  MISC_FEATURE (14)..(14): Xaa is phenylalanine, tyrosine, valine, leucine, isoleucine, methionine, or an amino acid residue which is covalently linked to another amino acid residue of the sequence
  MISC_FEATURE (15)..(15): Xaa is alanine, valine, glycine, serine, or an amino acid residue which is covalently linked to another amino acid residue of the sequence
  MISC_FEATURE (16)..(16): Xaa is glutamic acid, aspartic acid, or an amino acid residue which is covalently linked to another amino acid residue of the sequence
  MISC_FEATURE (23)..(23): Xaa is glycine, alanine, serine, or an amino acid residue which is covalently linked to another amino acid residue of the sequence
  MISC_FEATURE (24)..(24): Xaa is alanine, valine, glycine, serine, or an amino acid residue which is covalently linked to another amino acid residue of the sequence
  MISC_FEATURE (25)..(25): Xaa is isoleucine, leucine, valine, phenylalanine, methionine, or an amino acid residue which is covalently linked to another amino acid residue of the sequence
  MISC_FEATURE (26)..(26): Xaa is isoleucine, leucine, valine, phenylalanine, methionine, or an amino acid residue which is covalently linked to another amino acid residue of the sequence
  MISC_FEATURE (27)..(27): Xaa is glycine, alanine, serine, or an amino acid residue which is covalently linked to another amino acid residue of the sequence
  MISC_FEATURE (28)..(28): Xaa is leucine, isoleucine, valine, phenylalanine, methionine, or an amino acid residue which is covalently linked to another amino acid residue of the sequence
  MISC_FEATURE (29)..(29): Xaa is methionine, valine, leucine, isoleucine, alanine, or an amino acid residue which is covalently linked to another amino acid residue of the sequence
DSGYEVHHQXXXXXXXDVGSNKXXXXXXX

SEQ ID NO: 552 - protein, 28 aa, Artificial Sequence
  synthetic
  MISC_FEATURE (9)..(9): Xaa is lysine, arginine, or an amino acid residue which is covalently linked to another amino acid residue of the sequence
  MISC_FEATURE (10)..(10): Xaa is leucine, isoleucine, valine, phenylalanine, methionine, or an amino acid residue which is covalently linked to another amino acid residue of the sequence
  MISC_FEATURE (11)..(11): Xaa is valine, leucine, isoleucine, alanine, methionine, or an amino acid residue which is covalently linked to another amino acid residue of the sequence
  MISC_FEATURE (12)..(12): Xaa is phenylalanine, tyrosine, valine, leucine, isoleucine, methionine, or an amino acid residue which is covalently linked to another amino acid residue of the sequence
  MISC_FEATURE (13)..(13): Xaa is phenylalanine, tyrosine, valine, leucine, isoleucine, methionine, or an amino acid residue which is covalently linked to another amino acid residue of the sequence
  MISC_FEATURE (14)..(14): Xaa is alanine, valine, glycine, serine, or an amino acid residue which is covalently linked to another amino acid residue of the sequence
  MISC_FEATURE (15)..(15): Xaa is glutamic acid, aspartic acid, or an amino acid residue which is covalently linked to another amino acid residue of the sequence
  MISC_FEATURE (22)..(22): Xaa is glycine, alanine, serine, or an amino acid residue which is covalently linked to another amino acid residue of the sequence
  MISC_FEATURE (23)..(23): Xaa is alanine, valine, glycine, serine, or an amino acid residue which is covalently linked to another amino acid residue of the sequence
  MISC_FEATURE (24)..(24): Xaa is isoleucine, leucine, valine, phenylalanine, methionine, or an amino acid residue which is covalently linked to another amino acid residue of the sequence
  MISC_FEATURE (25)..(25): Xaa is isoleucine, leucine, valine, phenylalanine, methionine, or an amino acid residue which is covalently linked to another amino acid residue of the sequence
  MISC_FEATURE (26)..(26): Xaa is glycine, alanine, serine, or an amino acid residue which is covalently linked to another amino acid residue of the sequence
  MISC_FEATURE (27)..(27): Xaa is leucine, isoleucine, valine, phenylalanine, methionine, or an amino acid residue which is covalently linked to another amino acid residue of the sequence
  MISC_FEATURE (28)..(28): Xaa is methionine, valine, leucine, isoleucine, alanine, or an amino acid residue which is covalently linked to another amino acid residue of the sequence
SGYEVHHQXXXXXXXDVGSNKXXXXXXX

SEQ ID NO: 553 - protein, 27 aa, Artificial Sequence
  synthetic
  MISC_FEATURE (8)..(8): Xaa is lysine, arginine, or an amino acid residue which is covalently linked to another amino acid residue of the sequence
  MISC_FEATURE (9)..(9): Xaa is leucine, isoleucine, valine, phenylalanine, methionine, or an amino acid residue which is covalently linked to another amino acid residue of the sequence
  MISC_FEATURE (10)..(10): Xaa is valine, leucine, isoleucine, alanine, methionine, or an amino acid residue which is covalently linked to another amino acid residue of the sequence
  MISC_FEATURE (11)..(11): Xaa is phenylalanine, tyrosine, valine, leucine, isoleucine, methionine, or an amino acid residue which is covalently linked to another amino acid residue of the sequence
  MISC_FEATURE (12)..(12): Xaa is phenylalanine, tyrosine, valine, leucine, isoleucine, methionine, or an amino acid residue which is covalently linked to another amino acid residue of the sequence
  MISC_FEATURE (13)..(13): Xaa is alanine, valine, glycine, serine, or an amino acid residue which is covalently linked to another amino acid residue of the sequence
  MISC_FEATURE (14)..(14): Xaa is glutamic acid, aspartic acid, or an amino acid residue which is covalently linked to another amino acid residue of the sequence
  MISC_FEATURE (21)..(21): Xaa is glycine, alanine, serine, or an amino acid residue which is covalently linked to another amino acid residue of the sequence
  MISC_FEATURE (22)..(22): Xaa is alanine, valine, glycine, serine, or an amino acid residue which is covalently linked to another amino acid residue of the sequence
  MISC_FEATURE (23)..(23): Xaa is isoleucine, leucine, valine, phenylalanine, methionine, or an amino acid residue which is covalently linked to another amino acid residue of the sequence
  MISC_FEATURE (24)..(24): Xaa is isoleucine, leucine, valine, phenylalanine, methionine, or an amino acid residue which is covalently linked to another amino acid residue of the sequence
  MISC_FEATURE (25)..(25): Xaa is glycine, alanine, serine, or an amino acid residue which is covalently linked to another amino acid residue of the sequence
  MISC_FEATURE (26)..(26): Xaa is leucine, isoleucine, valine, phenylalanine, methionine, or an amino acid residue which is covalently linked to another amino acid residue of the sequence
  MISC_FEATURE (27)..(27): Xaa is methionine, valine, leucine, isoleucine, alanine, or an amino acid residue which is covalently linked to another amino acid residue of the sequence
GYEVHHQXXXXXXXDVGSNKXXXXXXX

SEQ ID NO: 554 - protein, 26 aa, Artificial Sequence
  synthetic
  MISC_FEATURE (7)..(7): Xaa is lysine, arginine, or an amino acid residue which is covalently linked to another amino acid residue of the sequence
  MISC_FEATURE (8)..(8): Xaa is leucine, isoleucine, valine, phenylalanine, methionine, or an amino acid residue which is covalently linked to another amino acid residue of the sequence
  MISC_FEATURE (9)..(9): Xaa is valine, leucine, isoleucine, alanine, methionine, or an amino acid residue which is covalently linked to another amino acid residue of the sequence
  MISC_FEATURE (10)..(10): Xaa is phenylalanine, tyrosine, valine, leucine, isoleucine, methionine, or an amino acid residue which is covalently linked to another amino acid residue of the sequence
  MISC_FEATURE (11)..(11): Xaa is phenylalanine, tyrosine, valine, leucine, isoleucine, methionine, or an amino acid residue which is covalently linked to another amino acid residue of the sequence
  MISC_FEATURE (12)..(12): Xaa is alanine, valine, glycine, serine, or an amino acid residue which is covalently linked to another amino acid residue of the sequence
  MISC_FEATURE (13)..(13): Xaa is glutamic acid, aspartic acid, or an amino acid residue which is covalently linked to another amino acid residue of the sequence
  MISC_FEATURE (20)..(20): Xaa is glycine, alanine, serine, or an amino acid residue which is covalently linked to another amino acid residue of the sequence
  MISC_FEATURE (21)..(21): Xaa is alanine, valine, glycine, serine, or an amino acid residue which is covalently linked to another amino acid residue of the sequence
  MISC_FEATURE (22)..(22): Xaa is isoleucine, leucine, valine, phenylalanine, methionine, or an amino acid residue which is covalently linked to another amino acid residue of the sequence
  MISC_FEATURE (23)..(23): Xaa is isoleucine, leucine, valine, phenylalanine, methionine, or an amino acid residue which is covalently linked to another amino acid residue of the sequence
  MISC_FEATURE (24)..(24): Xaa is glycine, alanine, serine, or an amino acid residue which is covalently linked to another amino acid residue of the sequence
  MISC_FEATURE (25)..(25): Xaa is leucine, isoleucine, valine, phenylalanine, methionine, or an amino acid residue which is covalently linked to another amino acid residue of the sequence
  MISC_FEATURE (26)..(26): Xaa is methionine, valine, leucine, isoleucine, alanine, or an amino acid residue which is covalently linked to another amino acid residue of the sequence
YEVHHQXXXXXXXDVGSNKXXXXXXX

SEQ ID NO: 555 - protein, 25 aa, Artificial Sequence
  synthetic
  MISC_FEATURE (6)..(6): Xaa is lysine, arginine, or an amino acid residue which is covalently linked to another amino acid residue of the sequence
  MISC_FEATURE (7)..(7): Xaa is leucine, isoleucine, valine, phenylalanine, methionine, or an amino acid residue which is covalently linked to another amino acid residue of the sequence
  MISC_FEATURE (8)..(8): Xaa is valine, leucine, isoleucine, alanine, methionine, or an amino acid residue which is covalently linked to another amino acid residue of the sequence
  MISC_FEATURE (9)..(9): Xaa is phenylalanine, tyrosine, valine, leucine, isoleucine, methionine, or an amino acid residue which is covalently linked to another amino acid residue of the sequence
  MISC_FEATURE (10)..(10): Xaa is phenylalanine, tyrosine, valine, leucine, isoleucine, methionine, or an amino acid residue which is covalently linked to another amino acid residue of the sequence
  MISC_FEATURE (11)..(11): Xaa is alanine, valine, glycine, serine, or an amino acid residue which is covalently linked to another amino acid residue of the sequence
  MISC_FEATURE (12)..(12): Xaa is glutamic acid, aspartic acid, or an amino acid residue which is covalently linked to another amino acid residue of the sequence
  MISC_FEATURE (19)..(19): Xaa is glycine, alanine, serine, or an amino acid residue which is covalently linked to another amino acid residue of the sequence
  MISC_FEATURE (20)..(20): Xaa is alanine, valine, glycine, serine, or an amino acid residue which is covalently linked to another amino acid residue of the sequence
  MISC_FEATURE (21)..(21): Xaa is isoleucine, leucine, valine, phenylalanine, methionine, or an amino acid residue which is covalently linked to another amino acid residue of the sequence
  MISC_FEATURE (22)..(22): Xaa is isoleucine, leucine, valine, phenylalanine, methionine, or an amino acid residue which is covalently linked to another amino acid residue of the sequence
  MISC_FEATURE (23)..(23): Xaa is glycine, alanine, serine, or an amino acid residue which is covalently linked to another amino acid residue of the sequence
  MISC_FEATURE (24)..(24): Xaa is leucine, isoleucine, valine, phenylalanine, methionine, or an amino acid residue which is covalently linked to another amino acid residue of the sequence
  MISC_FEATURE (25)..(25): Xaa is methionine, valine, leucine, isoleucine, alanine, or an amino acid residue which is covalently linked to another amino acid residue of the sequence
EVHHQXXXXXXXDVGSNKXXXXXXX

SEQ ID NO: 556 - protein, 24 aa, Artificial Sequence
  synthetic
  MISC_FEATURE (5)..(5): Xaa is lysine, arginine, or an amino acid residue which is covalently linked to another amino acid residue of the sequence
  MISC_FEATURE (6)..(6): Xaa is leucine, isoleucine, valine, phenylalanine, methionine, or an amino acid residue which is covalently linked to another amino acid residue of the sequence
  MISC_FEATURE (7)..(7): Xaa is valine, leucine, isoleucine, alanine, methionine, or an amino acid residue which is covalently linked to another amino acid residue of the sequence
  MISC_FEATURE (8)..(8): Xaa is phenylalanine, tyrosine, valine, leucine, isoleucine, methionine, or an amino acid residue which is covalently linked to another amino acid residue of the sequence
  MISC_FEATURE (9)..(9): Xaa is phenylalanine, tyrosine, valine, leucine, isoleucine, methionine, or an amino acid residue which is covalently linked to another amino acid residue of the sequence
  MISC_FEATURE (10)..(10): Xaa is alanine, valine, glycine, serine, or an amino acid residue which is covalently linked to another amino acid residue of the sequence
  MISC_FEATURE (11)..(11): Xaa is glutamic acid, aspartic acid, or an amino acid residue which is covalently linked to another amino acid residue of the sequence
  MISC_FEATURE (18)..(18): Xaa is glycine, alanine, serine, or an amino acid residue which is covalently linked to another amino acid residue of the sequence
  MISC_FEATURE (19)..(19): Xaa is alanine, valine, glycine, serine, or an amino acid residue which is covalently linked to another amino acid residue of the sequence
  MISC_FEATURE (20)..(20): Xaa is isoleucine, leucine, valine, phenylalanine, methionine, or an amino acid residue which is covalently linked to another amino acid residue of the sequence
  MISC_FEATURE (21)..(21): Xaa is isoleucine, leucine, valine, phenylalanine, methionine, or an amino acid residue which is covalently linked to another amino acid residue of the sequence
  MISC_FEATURE (22)..(22): Xaa is glycine, alanine, serine, or an amino acid residue which is covalently linked to another amino acid residue of the sequence
  MISC_FEATURE (23)..(23): Xaa is leucine, isoleucine, valine, phenylalanine, methionine, or an amino acid residue which is covalently linked to another amino acid residue of the sequence
  MISC_FEATURE (24)..(24): Xaa is methionine, valine, leucine, isoleucine, alanine, or an amino acid residue which is covalently linked to another amino acid residue of the sequence
VHHQXXXXXXXDVGSNKXXXXXXX

SEQ ID NO: 557 - protein, 23 aa, Artificial Sequence
  synthetic
  MISC_FEATURE (4)..(4): Xaa is lysine, arginine, or an amino acid residue which is covalently linked to another amino acid residue of the sequence
  MISC_FEATURE (5)..(5): Xaa is leucine, isoleucine, valine, phenylalanine, methionine, or an amino acid residue which is covalently linked to another amino acid residue of the sequence
  MISC_FEATURE (6)..(6): Xaa is valine, leucine, isoleucine, alanine, methionine, or an amino acid residue which is covalently linked to another amino acid residue of the sequence
  MISC_FEATURE (7)..(7): Xaa is phenylalanine, tyrosine, valine, leucine, isoleucine, methionine, or an amino acid residue which is covalently linked to another amino acid residue of the sequence
  MISC_FEATURE (8)..(8): Xaa is phenylalanine, tyrosine, valine, leucine, isoleucine, methionine, or an amino acid residue which is covalently linked to another amino acid residue of the sequence
  MISC_FEATURE (9)..(9): Xaa is alanine, valine, glycine, serine, or an amino acid residue which is covalently linked to another amino acid residue of the sequence
  MISC_FEATURE (10)..(10): Xaa is glutamic acid, aspartic acid, or an amino acid residue which is covalently linked to another amino acid residue of the sequence
  MISC_FEATURE (17)..(17): Xaa is glycine, alanine, serine, or an amino acid residue which is covalently linked to another amino acid residue of the sequence
  MISC_FEATURE (18)..(18): Xaa is alanine, valine, glycine, serine, or an amino acid residue which is covalently linked to another amino acid residue of the sequence
  MISC_FEATURE (19)..(19): Xaa is isoleucine, leucine, valine, phenylalanine, methionine, or an amino acid residue which is covalently linked to another amino acid residue of the sequence
  MISC_FEATURE (20)..(20): Xaa is isoleucine, leucine, valine, phenylalanine, methionine, or an amino acid residue which is covalently linked to another amino acid residue of the sequence
  MISC_FEATURE (21)..(21): Xaa is glycine, alanine, serine, or an amino acid residue which is covalently linked to another amino acid residue of the sequence
  MISC_FEATURE (22)..(22): Xaa is leucine, isoleucine, valine, phenylalanine, methionine, or an amino acid residue which is covalently linked to another amino acid residue of the sequence
  MISC_FEATURE (23)..(23): Xaa is methionine, valine, leucine, isoleucine, alanine, or an amino acid residue which is covalently linked to another amino acid residue of the sequence
HHQXXXXXXXDVGSNKXXXXXXX

SEQ ID NO: 558 - protein, 22 aa, Artificial Sequence
  synthetic
  MISC_FEATURE (3)..(3): Xaa is lysine, arginine, or an amino acid residue which is covalently linked to another amino acid residue of the sequence
  MISC_FEATURE (4)..(4): Xaa is leucine, isoleucine, valine, phenylalanine, methionine, or an amino acid residue which is covalently linked to another amino acid residue of the sequence
  MISC_FEATURE (5)..(5): Xaa is valine, leucine, isoleucine, alanine, methionine, or an amino acid residue which is covalently linked to another amino acid residue of the sequence
  MISC_FEATURE (6)..(6): Xaa is phenylalanine, tyrosine, valine, leucine, isoleucine, methionine, or an amino acid residue which is covalently linked to another amino acid residue of the sequence
  MISC_FEATURE (7)..(7): Xaa is phenylalanine, tyrosine, valine, leucine, isoleucine, methionine, or an amino acid residue which is covalently linked to another amino acid residue of the sequence
  MISC_FEATURE (8)..(8): Xaa is alanine, valine, glycine, serine, or an amino acid residue which is covalently linked to another amino acid residue of the sequence
  MISC_FEATURE (9)..(9): Xaa is glutamic acid, aspartic acid, or an amino acid residue which is covalently linked to another amino acid residue of the sequence
  MISC_FEATURE (16)..(16): Xaa is glycine, alanine, serine, or an amino acid residue which is covalently linked to another amino acid residue of the sequence
  MISC_FEATURE (17)..(17): Xaa is alanine, valine, glycine, serine, or an amino acid residue which is covalently linked to another amino acid residue of the sequence
  MISC_FEATURE (18)..(18): Xaa is isoleucine, leucine, valine, phenylalanine, methionine, or an amino acid residue which is covalently linked to another amino acid residue of the sequence
  MISC_FEATURE (19)..(19): Xaa is isoleucine, leucine, valine, phenylalanine, methionine, or an amino acid residue which is covalently linked to another amino acid residue of the sequence
  MISC_FEATURE (20)..(20): Xaa is glycine, alanine, serine, or an amino acid residue which is covalently linked to another amino acid residue of the sequence
  MISC_FEATURE (21)..(21): Xaa is leucine, isoleucine, valine, phenylalanine, methionine, or an amino acid residue which is covalently linked to another amino acid residue of the sequence
  MISC_FEATURE (22)..(22): Xaa is methionine, valine, leucine, isoleucine, alanine, or an amino acid residue which is covalently linked to another amino acid residue of the sequence
HQXXXXXXXDVGSNKXXXXXXX

SEQ ID NO: 559 - protein, 21 aa, Artificial Sequence
  synthetic
  MISC_FEATURE (2)..(2): Xaa is lysine, arginine, or an amino acid residue which is covalently linked to another amino acid residue of the sequence
  MISC_FEATURE (3)..(3): Xaa is leucine, isoleucine, valine, phenylalanine, methionine, or an amino acid residue which is covalently linked to another amino acid residue of the sequence
  MISC_FEATURE (4)..(4): Xaa is valine, leucine, isoleucine, alanine, methionine, or an amino acid residue which is covalently linked to another amino acid residue of the sequence
  MISC_FEATURE (5)..(5): Xaa is phenylalanine, tyrosine, valine, leucine, isoleucine, methionine, or an amino acid residue which is covalently linked to another amino acid residue of the sequence
  MISC_FEATURE (6)..(6): Xaa is phenylalanine, tyrosine, valine, leucine, isoleucine, methionine, or an amino acid residue which is covalently linked to another amino acid residue of the sequence
  MISC_FEATURE (7)..(7): Xaa is alanine, valine, glycine, serine, or an amino acid residue which is covalently linked to another amino acid residue of the sequence
  MISC_FEATURE (8)..(8): Xaa is glutamic acid, aspartic acid, or an amino acid residue which is covalently linked to another amino acid residue of the sequence
  MISC_FEATURE (15)..(15): Xaa is glycine, alanine, serine, or an amino acid residue which is covalently linked to another amino acid residue of the sequence
  MISC_FEATURE (16)..(16): Xaa is alanine, valine, glycine, serine, or an amino acid residue which is covalently linked to another amino acid residue of the sequence
  MISC_FEATURE (17)..(17): Xaa is isoleucine, leucine, valine, phenylalanine, methionine, or an amino acid residue which is covalently linked to another amino acid residue of the sequence
  MISC_FEATURE (18)..(18): Xaa is isoleucine, leucine, valine, phenylalanine, methionine, or an amino acid residue which is covalently linked to another amino acid residue of the sequence
  MISC_FEATURE (19)..(19): Xaa is glycine, alanine, serine, or an amino acid residue which is covalently linked to another amino acid residue of the sequence
  MISC_FEATURE (20)..(20): Xaa is leucine, isoleucine, valine, phenylalanine, methionine, or an amino acid residue which is covalently linked to another amino acid residue of the sequence
  MISC_FEATURE (21)..(21): Xaa is methionine, valine, leucine, isoleucine, alanine, or an amino acid residue which is covalently linked to another amino acid residue of the sequence
QXXXXXXXDVGSNKXXXXXXX

SEQ ID NO: 560 - protein, 20 aa, Artificial Sequence
  synthetic
  MISC_FEATURE (1)..(1): Xaa is lysine, arginine, or an amino acid residue which is covalently linked to another amino acid residue of the sequence
  MISC_FEATURE (2)..(2): Xaa is leucine, isoleucine, valine, phenylalanine, methionine, or an amino acid residue which is covalently linked to another amino acid residue of the sequence
  MISC_FEATURE (3)..(3): Xaa is valine, leucine, isoleucine, alanine, methionine, or an amino acid residue which is covalently linked to another amino acid residue of the sequence
  MISC_FEATURE (4)..(4): Xaa is phenylalanine, tyrosine, valine, leucine, isoleucine, methionine, or an amino acid residue which is covalently linked to another amino acid residue of the sequence
  MISC_FEATURE (5)..(5): Xaa is phenylalanine, tyrosine, valine, leucine, isoleucine, methionine, or an amino acid residue which is covalently linked to another amino acid residue of the sequence
  MISC_FEATURE (6)..(6): Xaa is alanine, valine, glycine, serine, or an amino acid residue which is covalently linked to another amino acid residue of the sequence
  MISC_FEATURE (7)..(7): Xaa is glutamic acid, aspartic acid, or an amino acid residue which is covalently linked to another amino acid residue of the sequence
  MISC_FEATURE (14)..(14): Xaa is glycine, alanine, serine, or an amino acid residue which is covalently linked to another amino acid residue of the sequence
  MISC_FEATURE (15)..(15): Xaa is alanine, valine, glycine, serine, or an amino acid residue which is covalently linked to another amino acid residue of the sequence
  MISC_FEATURE (16)..(16): Xaa is isoleucine, leucine, valine, phenylalanine, methionine, or an amino acid residue which is covalently linked to another amino acid residue of the sequence
  MISC_FEATURE (17)..(17): Xaa is isoleucine, leucine, valine, phenylalanine, methionine, or an amino acid residue which is covalently linked to another amino acid residue of the sequence
  MISC_FEATURE (18)..(18): Xaa is glycine, alanine, serine, or an amino acid residue which is covalently linked to another amino acid residue of the sequence
  MISC_FEATURE (19)..(19): Xaa is leucine, isoleucine, valine, phenylalanine, methionine, or an amino acid residue which is covalently linked to another amino acid residue of the sequence
  MISC_FEATURE (20)..(20): Xaa is methionine, valine, leucine, isoleucine, alanine, or an amino acid residue which is covalently linked to another amino acid residue of the sequence
XXXXXXXDVGSNKXXXXXXX

SEQ ID NO: 561 - protein, 19 aa, Artificial Sequence
  synthetic
  MISC_FEATURE (1)..(1): Xaa is leucine, isoleucine, valine, phenylalanine, methionine, or an amino acid residue which is covalently linked to another amino acid residue of the sequence
  MISC_FEATURE (2)..(2): Xaa is valine, leucine, isoleucine, alanine, methionine, or an amino acid residue which is covalently linked to another amino acid residue of the sequence
  MISC_FEATURE (3)..(3): Xaa is phenylalanine, tyrosine, valine, leucine, isoleucine, methionine, or an amino acid residue which is covalently linked to another amino acid residue of the sequence
  MISC_FEATURE (4)..(4): Xaa is phenylalanine, tyrosine, valine, leucine, isoleucine, methionine, or an amino acid residue which is covalently linked to another amino acid residue of the sequence
  MISC_FEATURE (5)..(5): Xaa is alanine, valine, glycine, serine, or an amino acid residue which is covalently linked to another amino acid residue of the sequence
  MISC_FEATURE (6)..(6): Xaa is glutamic acid, aspartic acid, or an amino acid residue which is covalently linked to another amino acid residue of the sequence
  MISC_FEATURE (13)..(13): Xaa is glycine, alanine, serine, or an amino acid residue which is covalently linked to another amino acid residue of the sequence
  MISC_FEATURE (14)..(14): Xaa is alanine, valine, glycine, serine, or an amino acid residue which is covalently linked to another amino acid residue of the sequence
  MISC_FEATURE (15)..(15): Xaa is isoleucine, leucine, valine, phenylalanine, methionine, or an amino acid residue which is covalently linked to another amino acid residue of the sequence
  MISC_FEATURE (16)..(16): Xaa is isoleucine, leucine, valine, phenylalanine, methionine, or an amino acid residue which is covalently linked to another amino acid residue of the sequence
  MISC_FEATURE (17)..(17): Xaa is glycine, alanine, serine, or an amino acid residue which is covalently linked to another amino acid residue of the sequence
  MISC_FEATURE (18)..(18): Xaa is leucine, isoleucine, valine, phenylalanine, methionine, or an amino acid residue which is covalently linked to another amino acid residue of the sequence
XXXXXXDVGSNKXXXXXXM

SEQ ID NO: 562 - protein, 18 aa, Artificial Sequence
  synthetic
  MISC_FEATURE (1)..(1): Xaa is valine, leucine, isoleucine, alanine, methionine, or an amino acid residue which is covalently linked to another amino acid residue of the sequence
  MISC_FEATURE (2)..(2): Xaa is phenylalanine, tyrosine, valine, leucine, isoleucine, methionine, or an amino acid residue which is covalently linked to another amino acid residue of the sequence
  MISC_FEATURE (3)..(3): Xaa is phenylalanine, tyrosine, valine, leucine, isoleucine, methionine, or an amino acid residue which is covalently linked to another amino acid residue of the sequence
  MISC_FEATURE (4)..(4): Xaa is alanine, valine, glycine, serine, or an amino acid residue which is covalently linked to another amino acid residue of the sequence
  MISC_FEATURE (5)..(5): Xaa is glutamic acid, aspartic acid, or an amino acid residue which is covalently linked to another amino acid residue of the sequence
  MISC_FEATURE (12)..(12): Xaa is glycine, alanine, serine, or an amino acid residue which is covalently linked to another amino acid residue of the sequence
  MISC_FEATURE (13)..(13): Xaa is alanine, valine, glycine, serine, or an amino acid residue which is covalently linked to another amino acid residue of the sequence
  MISC_FEATURE (14)..(14): Xaa is isoleucine, leucine, valine, phenylalanine, methionine, or an amino acid residue which is covalently linked to another amino acid residue of the sequence
  MISC_FEATURE (15)..(15): Xaa is isoleucine, leucine, valine, phenylalanine, methionine, or an amino acid residue which is covalently linked to another amino acid residue of the sequence
  MISC_FEATURE (16)..(16): Xaa is glycine, alanine, serine, or an amino acid residue which is covalently linked to another amino acid residue of the sequence
XXXXXDVGSNKXXXXXLM

SEQ ID NO: 563 - protein, 17 aa, Artificial Sequence
  synthetic
  MISC_FEATURE (1)..(1): Xaa is phenylalanine, tyrosine, valine, leucine, isoleucine, methionine, or an amino acid residue which is covalently linked to another amino acid residue of the sequence
  MISC_FEATURE (2)..(2): Xaa is phenylalanine, tyrosine, valine, leucine, isoleucine, methionine, or an amino acid residue which is covalently linked to another amino acid residue of the sequence
  MISC_FEATURE (3)..(3): Xaa is alanine, valine, glycine, serine, or an amino acid residue which is covalently linked to another amino acid residue of the sequence
  MISC_FEATURE (4)..(4): Xaa is glutamic acid, aspartic acid, or an amino acid residue which is covalently linked to another amino acid residue of the sequence
  MISC_FEATURE (11)..(11): Xaa is glycine, alanine, serine, or an amino acid residue which is covalently linked to another amino acid residue of the sequence
  MISC_FEATURE (12)..(12): Xaa is alanine, valine, glycine, serine, or an amino acid residue which is covalently linked to another amino acid residue of the sequence
  MISC_FEATURE (13)..(13): Xaa is isoleucine, leucine, valine, phenylalanine, methionine, or an amino acid residue which is covalently linked to another amino acid residue of the sequence
  MISC_FEATURE (14)..(14): Xaa is isoleucine, leucine, valine, phenylalanine, methionine, or an amino acid residue which is covalently linked to another amino acid residue of the sequence
XXXXDVGSNKXXXXGLM

SEQ ID NO: 564 - protein, 16 aa, Artificial Sequence
  synthetic
  MISC_FEATURE (1)..(1): Xaa is phenylalanine, tyrosine, valine, leucine, isoleucine, methionine, or an amino acid residue which is covalently linked to another amino acid residue of the sequence
  MISC_FEATURE (2)..(2): Xaa is alanine, valine, glycine, serine, or an amino acid residue which is covalently linked to another amino acid residue of the sequence
  MISC_FEATURE (3)..(3): Xaa is glutamic acid, aspartic acid, or an amino acid residue which is covalently linked to another amino acid residue of the sequence
  MISC_FEATURE (10)..(10): Xaa is glycine, alanine, serine, or an amino acid residue which is covalently linked to another amino acid residue of the sequence
  MISC_FEATURE (11)..(11): Xaa is alanine, valine, glycine, serine, or an amino acid residue which is covalently linked to another amino acid residue of the sequence
  MISC_FEATURE (12)..(12): Xaa is isoleucine, leucine, valine, phenylalanine, methionine, or an amino acid residue which is covalently linked to another amino acid residue of the sequence
XXXDVGSNKXXXIGLM

SEQ ID NO: 565 - protein, 15 aa, Artificial Sequence
  synthetic
  MISC_FEATURE (1)..(1): Xaa is alanine, valine, glycine, serine, or an amino acid residue which is covalently linked to another amino acid residue of the sequence
  MISC_FEATURE (2)..(2): Xaa is glutamic acid, aspartic acid, or an amino acid residue which is covalently linked to another amino acid residue of the sequence
  MISC_FEATURE (9)..(9): Xaa is glycine, alanine, serine, or an amino acid residue which is covalently linked to another amino acid residue of the sequence
  MISC_FEATURE (10)..(10): Xaa is alanine, valine, glycine, serine, or an amino acid residue which is covalently linked to another amino acid residue of the sequence
XXDVGSNKXXIIGLM

SEQ ID NO: 566 - protein, 14 aa, Artificial Sequence
  synthetic
  MISC_FEATURE (1)..(1): Xaa is glutamic acid, aspartic acid, or an amino acid residue which is covalently linked to another amino acid residue of the sequence
  MISC_FEATURE (8)..(8): Xaa is glycine, alanine, serine, or an amino acid residue which is covalently linked to another amino acid residue of the sequence
XDVGSNKXAIIGLM

SEQ ID NO: 567 - protein, 34 aa, Artificial Sequence
  synthetic
  MISC_FEATURE (17)..(17): Xaa is leucine, isoleucine, valine, phenylalanine, methionine, or an amino acid residue which is covalently linked to another amino acid residue of the sequence
  MISC_FEATURE (18)..(18): Xaa is valine, leucine, isoleucine, alanine, methionine, or an amino acid residue which is covalently linked to another amino acid residue of the sequence
  MISC_FEATURE (19)..(19): Xaa is phenylalanine, tyrosine, valine, leucine, isoleucine, methionine, or an amino acid residue which is covalently linked to another amino acid residue of the sequence
  MISC_FEATURE (20)..(20): Xaa is phenylalanine, tyrosine, valine, leucine, isoleucine, methionine, or an amino acid residue which is covalently linked to another amino acid residue of the sequence
  MISC_FEATURE (21)..(21): Xaa is alanine, valine, glycine, serine, or an amino acid residue which is covalently linked to another amino acid residue of the sequence
  MISC_FEATURE (22)..(22): Xaa is glutamic acid, aspartic acid, or an amino acid residue which is covalently linked to another amino acid residue of the sequence
  MISC_FEATURE (29)..(29): Xaa is glycine, alanine, serine, or an amino acid residue which is covalently linked to another amino acid residue of the sequence
  MISC_FEATURE (30)..(30): Xaa is alanine, valine, glycine, serine, or an amino acid residue which is covalently linked to another amino acid residue of the sequence
  MISC_FEATURE (31)..(31): Xaa is isoleucine, leucine, valine, phenylalanine, methionine, or an amino acid residue which is covalently linked to another amino acid residue of the sequence
  MISC_FEATURE (32)..(32): Xaa is isoleucine, leucine, valine, phenylalanine, methionine, or an amino acid residue which is covalently linked to another amino acid residue of the sequence
  MISC_FEATURE (33)..(33): Xaa is glycine, alanine, serine, or an amino acid residue which is covalently linked to another amino acid residue of the sequence
  MISC_FEATURE (34)..(34): Xaa is leucine, isoleucine, valine, phenylalanine, methionine, or an amino acid residue which is covalently linked to another amino acid residue of the sequence
DAEFRHDSGYEVHHQKXXXXXXDVGSNKXXXXXX

SEQ ID NO: 568 - protein, 33 aa, Artificial Sequence
  synthetic
  MISC_FEATURE (16)..(16): Xaa is leucine, isoleucine, valine, phenylalanine, methionine, or an amino acid residue which is covalently linked to another amino acid residue of the sequence
  MISC_FEATURE (17)..(17): Xaa is valine, leucine, isoleucine, alanine, methionine, or an amino acid residue which is covalently linked to another amino acid residue of the sequence
  MISC_FEATURE (18)..(18): Xaa is phenylalanine, tyrosine, valine, leucine, isoleucine, methionine, or an amino acid residue which is covalently linked to another amino acid residue of the sequence
  MISC_FEATURE (19)..(19): Xaa is phenylalanine, tyrosine, valine, leucine, isoleucine, methionine, or an amino acid residue which is covalently linked to another amino acid residue of the sequence
  MISC_FEATURE (20)..(20): Xaa is alanine, valine, glycine, serine, or an amino acid residue which is covalently linked to another amino acid residue of the sequence
  MISC_FEATURE (21)..(21): Xaa is glutamic acid, aspartic acid, or an amino acid residue which is covalently linked to another amino acid residue of the sequence
  MISC_FEATURE (28)..(28): Xaa is glycine, alanine, serine, or an amino acid residue which is covalently linked to another amino acid residue of the sequence
  MISC_FEATURE (29)..(29): Xaa is alanine, valine, glycine, serine, or an amino acid residue which is covalently linked to another amino acid residue of the sequence
  MISC_FEATURE (30)..(30): Xaa is isoleucine, leucine, valine, phenylalanine, methionine, or an amino acid residue which is covalently linked to another amino acid residue of the sequence
  MISC_FEATURE (31)..(31): Xaa is isoleucine, leucine, valine, phenylalanine, methionine, or an amino acid residue which is covalently linked to another amino acid residue of the sequence
  MISC_FEATURE (32)..(32): Xaa is glycine, alanine, serine, or an amino acid residue which is covalently linked to another amino acid residue of the sequence
  MISC_FEATURE (33)..(33): Xaa is leucine, isoleucine, valine, phenylalanine, methionine, or an amino acid residue which is covalently linked to another amino acid residue of the sequence
AEFRHDSGYEVHHQKXXXXXXDVGSNKXXXXXX

SEQ ID NO: 569 - protein, 32 aa, Artificial Sequence
  synthetic
  MISC_FEATURE (15)..(15): Xaa is leucine, isoleucine, valine, phenylalanine, methionine, or an amino acid residue which is covalently linked to another amino acid residue of the sequence
  MISC_FEATURE (16)..(16): Xaa is valine, leucine, isoleucine, alanine, methionine, or an amino acid residue which is covalently linked to another amino acid residue of the sequence
  MISC_FEATURE (17)..(17): Xaa is phenylalanine, tyrosine, valine, leucine, isoleucine, methionine, or an amino acid residue which is covalently linked to another amino acid residue of the sequence
  MISC_FEATURE (18)..(18): Xaa is phenylalanine, tyrosine, valine, leucine, isoleucine, methionine, or an amino acid residue which is covalently linked to another amino acid residue of the sequence
  MISC_FEATURE (19)..(19): Xaa is alanine, valine, glycine, serine, or an amino acid residue which is covalently linked to another amino acid residue of the sequence
  MISC_FEATURE (20)..(20): Xaa is glutamic acid, aspartic acid, or an amino acid residue which is covalently linked to another amino acid residue of the sequence
  MISC_FEATURE (27)..(27): Xaa is glycine, alanine, serine, or an amino acid residue which is covalently linked to another amino acid residue of the sequence
  MISC_FEATURE (28)..(28): Xaa is alanine, valine, glycine, serine, or an amino acid residue which is covalently linked to another amino acid residue of the sequence
  MISC_FEATURE (29)..(29): Xaa is isoleucine, leucine, valine, phenylalanine, methionine, or an amino acid residue which is covalently linked to another amino acid residue of the sequence
  MISC_FEATURE (30)..(30): Xaa is isoleucine, leucine, valine, phenylalanine, methionine, or an amino acid residue which is covalently linked to another amino acid residue of the sequence
  MISC_FEATURE (31)..(31): Xaa is glycine, alanine, serine, or an amino acid residue which is covalently linked to another amino acid residue of the sequence
  MISC_FEATURE (32)..(32): Xaa is leucine, isoleucine, valine, phenylalanine, methionine, or an amino acid residue which is covalently linked to another amino acid residue of the sequence
EFRHDSGYEVHHQKXXXXXXDVGSNKXXXXXX

SEQ ID NO: 570 - protein, 31 aa, Artificial Sequence
  synthetic
  MISC_FEATURE (14)..(14): Xaa is leucine, isoleucine, valine, phenylalanine, methionine, or an amino acid residue which is covalently linked to another amino acid residue of the sequence
  MISC_FEATURE (15)..(15): Xaa is valine, leucine, isoleucine, alanine, methionine, or an amino acid residue which is covalently linked to another amino acid residue of the sequence
  MISC_FEATURE (16)..(16): Xaa is phenylalanine, tyrosine, valine, leucine, isoleucine, methionine, or an amino acid residue which is covalently linked to another amino acid residue of the sequence
  MISC_FEATURE (17)..(17): Xaa is phenylalanine, tyrosine, valine, leucine, isoleucine, methionine, or an amino acid residue which is covalently linked to another amino acid residue of the sequence
  MISC_FEATURE (18)..(18): Xaa is alanine, valine, glycine, serine, or an amino acid residue which is covalently linked to another amino acid residue of the sequence
  MISC_FEATURE (19)..(19): Xaa is glutamic acid, aspartic acid, or an amino acid residue which is covalently linked to another amino acid residue of the sequence
  MISC_FEATURE (26)..(26): Xaa is glycine, alanine, serine, or an amino acid residue which is covalently linked to another amino acid residue of the sequence
  MISC_FEATURE (27)..(27): Xaa is alanine, valine, glycine, serine, or an amino acid residue which is covalently linked to another amino acid residue of the sequence
  MISC_FEATURE (28)..(28): Xaa is isoleucine, leucine, valine, phenylalanine, methionine, or an amino acid residue which is covalently linked to another amino acid residue of the sequence
  MISC_FEATURE (29)..(29): Xaa is isoleucine, leucine, valine, phenylalanine, methionine, or an amino acid residue which is covalently linked to another amino acid residue of the sequence
  MISC_FEATURE (30)..(30): Xaa is glycine, alanine, serine, or an amino acid residue which is covalently linked to another amino acid residue of the sequence
  MISC_FEATURE (31)..(31): Xaa is leucine, isoleucine, valine, phenylalanine, methionine, or an amino acid residue which is covalently linked to another amino acid residue of the sequence
FRHDSGYEVHHQKXXXXXXDVGSNKXXXXXX

SEQ ID NO: 571 - protein, 30 aa, Artificial Sequence
  synthetic
  MISC_FEATURE (13)..(13): Xaa is leucine, isoleucine, valine, phenylalanine, methionine, or an amino acid residue which is covalently linked to another amino acid residue of the sequence
  MISC_FEATURE (14)..(14): Xaa is valine, leucine, isoleucine, alanine, methionine, or an amino acid residue which is covalently linked to another amino acid residue of the sequence
  MISC_FEATURE (15)..(15): Xaa is phenylalanine, tyrosine, valine, leucine, isoleucine, methionine, or an amino acid residue which is covalently linked to another amino acid residue of the sequence
  MISC_FEATURE (16)..(16): Xaa is phenylalanine, tyrosine, valine, leucine, isoleucine, methionine, or an amino acid residue which is covalently linked to another amino acid residue of the sequence
  MISC_FEATURE (17)..(17): Xaa is alanine, valine, glycine, serine, or an amino acid residue which is covalently linked to another amino acid residue of the sequence
  MISC_FEATURE (18)..(18): Xaa is glutamic acid, aspartic acid, or an amino acid residue which is covalently linked to another amino acid residue of the sequence
  MISC_FEATURE (25)..(25): Xaa is glycine, alanine, serine, or an amino acid residue which is covalently linked to another amino acid residue of the sequence
  MISC_FEATURE (26)..(26): Xaa is alanine, valine, glycine, serine, or an amino acid residue which is covalently linked to another amino acid residue of the sequence
  MISC_FEATURE (27)..(27): Xaa is isoleucine, leucine, valine, phenylalanine, methionine, or an amino acid residue which is covalently linked to another amino acid residue of the sequence
  MISC_FEATURE (28)..(28): Xaa is isoleucine, leucine, valine, phenylalanine, methionine, or an amino acid residue which is covalently linked to another amino acid residue of the sequence
  MISC_FEATURE (29)..(29): Xaa is glycine, alanine, serine, or an amino acid residue which is covalently linked to another amino acid residue of the sequence
  MISC_FEATURE (30)..(30): Xaa is leucine, isoleucine, valine, phenylalanine, methionine, or an amino acid residue which is covalently linked to another amino acid residue of the sequence
RHDSGYEVHHQKXXXXXXDVGSNKXXXXXX

SEQ ID NO: 572 - protein, 29 aa, Artificial Sequence
  synthetic
  MISC_FEATURE (12)..(12): Xaa is leucine, isoleucine, valine, phenylalanine, methionine, or an amino acid residue which is covalently linked to another amino acid residue of the sequence
  MISC_FEATURE (13)..(13): Xaa is valine, leucine, isoleucine, alanine, methionine, or an amino acid residue which is covalently linked to another amino acid residue of the sequence
  MISC_FEATURE (14)..(14): Xaa is phenylalanine, tyrosine, valine, leucine, isoleucine, methionine, or an amino acid residue which is covalently linked to another amino acid residue of the sequence
  MISC_FEATURE (15)..(15): Xaa is phenylalanine, tyrosine, valine, leucine, isoleucine, methionine, or an amino acid residue which is covalently linked to another amino acid residue of the sequence
  MISC_FEATURE (16)..(16): Xaa is alanine, valine, glycine, serine, or an amino acid residue which is covalently linked to another amino acid residue of the sequence
  MISC_FEATURE (17)..(17): Xaa is glutamic acid, aspartic acid, or an amino acid residue which is covalently linked to another amino acid residue of the sequence
  MISC_FEATURE (24)..(24): Xaa is glycine, alanine, serine, or an amino acid residue which is covalently linked to another amino acid residue of the sequence
  MISC_FEATURE (25)..(25): Xaa is alanine, valine, glycine, serine, or an amino acid residue which is covalently linked to another amino acid residue of the sequence
  MISC_FEATURE (26)..(26): Xaa is isoleucine, leucine, valine, phenylalanine, methionine, or an amino acid residue which is covalently linked to another amino acid residue of the sequence
  MISC_FEATURE (27)..(27): Xaa is isoleucine, leucine, valine, phenylalanine, methionine, or an amino acid residue which is covalently linked to another amino acid residue of the sequence
  MISC_FEATURE (28)..(28): Xaa is glycine, alanine, serine, or an amino acid residue which is covalently linked to another amino acid residue of the sequence
  MISC_FEATURE (29)..(29): Xaa is leucine, isoleucine, valine, phenylalanine, methionine, or an amino acid residue which is covalently linked to another amino acid residue of the sequence
HDSGYEVHHQKXXXXXXDVGSNKXXXXXX

SEQ ID NO: 573 - protein, 28 aa, Artificial Sequence
  synthetic
  MISC_FEATURE (11)..(11): Xaa is leucine, isoleucine, valine, phenylalanine, methionine, or an amino acid residue which is covalently linked to another amino acid residue of the sequence
  MISC_FEATURE (12)..(12): Xaa is valine, leucine, isoleucine, alanine, methionine, or an amino acid residue which is covalently linked to another amino acid residue of the sequence
  MISC_FEATURE (13)..(13): Xaa is phenylalanine, tyrosine, valine, leucine, isoleucine, methionine, or an amino acid residue which is covalently linked to another amino acid residue of the sequence
  MISC_FEATURE (14)..(14): Xaa is phenylalanine, tyrosine, valine, leucine, isoleucine, methionine, or an amino acid residue which is covalently linked to another amino acid residue of the sequence
  MISC_FEATURE (15)..(15): Xaa is alanine, valine, glycine, serine, or an amino acid residue which is covalently linked to another amino acid residue of the sequence
  MISC_FEATURE (16)..(16): Xaa is glutamic acid, aspartic acid, or an amino acid residue which is covalently linked to another amino acid residue of the sequence
  MISC_FEATURE (23)..(23): Xaa is glycine, alanine, serine, or an amino acid residue which is covalently linked to another amino acid residue of the sequence
  MISC_FEATURE (24)..(24): Xaa is alanine, valine, glycine, serine, or an amino acid residue which is covalently linked to another amino acid residue of the sequence
  MISC_FEATURE (25)..(25): Xaa is isoleucine, leucine, valine, phenylalanine, methionine, or an amino acid residue which is covalently linked to another amino acid residue of the sequence
  MISC_FEATURE (26)..(26): Xaa is isoleucine, leucine, valine, phenylalanine, methionine, or an amino acid residue which is covalently linked to another amino acid residue of the sequence
  MISC_FEATURE (27)..(27): Xaa is glycine, alanine, serine, or an amino acid residue which is covalently linked to another amino acid residue of the sequence
  MISC_FEATURE (28)..(28): Xaa is leucine, isoleucine, valine, phenylalanine, methionine, or an amino acid residue which is covalently linked to another amino acid residue of the sequence
DSGYEVHHQKXXXXXXDVGSNKXXXXXX

SEQ ID NO: 574 - protein, 27 aa, Artificial Sequence
  synthetic
  MISC_FEATURE (10)..(10): Xaa is leucine, isoleucine, valine, phenylalanine, methionine, or an amino acid residue which is covalently linked to another amino acid residue of the sequence
  MISC_FEATURE (11)..(11): Xaa is valine, leucine, isoleucine, alanine, methionine, or an amino acid residue which is covalently linked to another amino acid residue of the sequence
  MISC_FEATURE (12)..(12): Xaa is phenylalanine, tyrosine, valine, leucine, isoleucine, methionine, or an amino acid residue which is covalently linked to another amino acid residue of the sequence
  MISC_FEATURE (13)..(13): Xaa is phenylalanine, tyrosine, valine, leucine, isoleucine, methionine, or an amino acid residue which is covalently linked to another amino acid residue of the sequence
  MISC_FEATURE (14)..(14): Xaa is alanine, valine, glycine, serine, or an amino acid residue which is covalently linked to another amino acid residue of the sequence
  MISC_FEATURE (15)..(15): Xaa is glutamic acid, aspartic acid, or an amino acid residue which is covalently linked to another amino acid residue of the sequence
  MISC_FEATURE (22)..(22): Xaa is glycine, alanine, serine, or an amino acid residue which is covalently linked to another amino acid residue of the sequence
  MISC_FEATURE (23)..(23): Xaa is alanine, valine, glycine, serine, or an amino acid residue which is covalently linked to another amino acid residue of the sequence
  MISC_FEATURE (24)..(24): Xaa is isoleucine, leucine, valine, phenylalanine, methionine, or an amino acid residue which is covalently linked to another amino acid residue of the sequence
  MISC_FEATURE (25)..(25): Xaa is isoleucine, leucine, valine, phenylalanine, methionine, or an amino acid residue which is covalently linked to another amino acid residue of the sequence
  MISC_FEATURE (26)..(26): Xaa is glycine, alanine, serine, or an amino acid residue which is covalently linked to another amino acid residue of the sequence
  MISC_FEATURE (27)..(27): Xaa is leucine, isoleucine, valine, phenylalanine, methionine, or an amino acid residue which is covalently linked to another amino acid residue of the sequence
SGYEVHHQKXXXXXXDVGSNKXXXXXX

SEQ ID NO: 575 - protein, 26 aa, Artificial Sequence
  synthetic
  MISC_FEATURE (9)..(9): Xaa is leucine, isoleucine, valine, phenylalanine, methionine, or an amino acid residue which is covalently linked to another amino acid residue of the sequence
  MISC_FEATURE (10)..(10): Xaa is valine, leucine, isoleucine, alanine, methionine, or an amino acid residue which is covalently linked to another amino acid residue of the sequence
  MISC_FEATURE (11)..(11): Xaa is phenylalanine, tyrosine, valine, leucine, isoleucine, methionine, or an amino acid residue which is covalently linked to another amino acid residue of the sequence
  MISC_FEATURE (12)..(12): Xaa is phenylalanine, tyrosine, valine, leucine, isoleucine, methionine, or an amino acid residue which is covalently linked to another amino acid residue of the sequence
  MISC_FEATURE (13)..(13): Xaa is alanine, valine, glycine, serine, or an amino acid residue which is covalently linked to another amino acid residue of the sequence
  MISC_FEATURE (14)..(14): Xaa is glutamic acid, aspartic acid, or an amino acid residue which is covalently linked to another amino acid residue of the sequence
  MISC_FEATURE (21)..(21): Xaa is glycine, alanine, serine, or an amino acid residue which is covalently linked to another amino acid residue of the sequence
  MISC_FEATURE (22)..(22): Xaa is alanine, valine, glycine, serine, or an amino acid residue which is covalently linked to another amino acid residue of the sequence
  MISC_FEATURE (23)..(23): Xaa is isoleucine, leucine, valine, phenylalanine, methionine, or an amino acid residue which is covalently linked to another amino acid residue of the sequence
  MISC_FEATURE (24)..(24): Xaa is isoleucine, leucine, valine, phenylalanine, methionine, or an amino acid residue which is covalently linked to another amino acid residue of the sequence
  MISC_FEATURE (25)..(25): Xaa is glycine, alanine, serine, or an amino acid residue which is covalently linked to another amino acid residue of the sequence
  MISC_FEATURE (26)..(26): Xaa is leucine, isoleucine, valine, phenylalanine, methionine, or an amino acid residue which is covalently linked to another amino acid residue of the sequence
GYEVHHQKXXXXXXDVGSNKXXXXXX

SEQ ID NO: 576 - protein, 25 aa, Artificial Sequence
  synthetic
  MISC_FEATURE (8)..(8): Xaa is leucine, isoleucine, valine, phenylalanine, methionine, or an amino acid residue which is covalently linked to another amino acid residue of the sequence
  MISC_FEATURE (9)..(9): Xaa is valine, leucine, isoleucine, alanine, methionine, or an amino acid residue which is covalently linked to another amino acid residue of the sequence
  MISC_FEATURE (10)..(10): Xaa is phenylalanine, tyrosine, valine, leucine, isoleucine, methionine, or an amino acid residue which is covalently linked to another amino acid residue of the sequence
  MISC_FEATURE (11)..(11): Xaa is phenylalanine, tyrosine, valine, leucine, isoleucine, methionine, or an amino acid residue which is covalently linked to another amino acid residue of the sequence
  MISC_FEATURE (12)..(12): Xaa is alanine, valine, glycine, serine, or an amino acid residue which is covalently linked to another amino acid residue of the sequence
  MISC_FEATURE (13)..(13): Xaa is glutamic acid, aspartic acid, or an amino acid residue which is covalently linked to another amino acid residue of the sequence
  MISC_FEATURE (20)..(20): Xaa is glycine, alanine, serine, or an amino acid residue which is covalently linked to another amino acid residue of the sequence
  MISC_FEATURE (21)..(21): Xaa is alanine, valine, glycine, serine, or an amino acid residue which is covalently linked to another amino acid residue of the sequence
  MISC_FEATURE (22)..(22): Xaa is isoleucine, leucine, valine, phenylalanine, methionine, or an amino acid residue which is covalently linked to another amino acid residue of the sequence
  MISC_FEATURE (23)..(23): Xaa is isoleucine, leucine, valine, phenylalanine, methionine, or an amino acid residue which is covalently linked to another amino acid residue of the sequence
  MISC_FEATURE (24)..(24): Xaa is glycine, alanine, serine, or an amino acid residue which is covalently linked to another amino acid residue of the sequence
  MISC_FEATURE (25)..(25): Xaa is leucine, isoleucine, valine, phenylalanine, methionine, or an amino acid residue which is covalently linked to another amino acid residue of the sequence
YEVHHQKXXXXXXDVGSNKXXXXXX

SEQ ID NO: 577 - protein, 24 aa, Artificial Sequence
  synthetic
  MISC_FEATURE (7)..(7): Xaa is leucine, isoleucine, valine, phenylalanine, methionine, or an amino acid residue which is covalently linked to another amino acid residue of the sequence
  MISC_FEATURE (8)..(8): Xaa is valine, leucine, isoleucine, alanine, methionine, or an amino acid residue which is covalently linked to another amino acid residue of the sequence
  MISC_FEATURE (9)..(9): Xaa is phenylalanine, tyrosine, valine, leucine, isoleucine, methionine, or an amino acid residue which is covalently linked to another amino acid residue of the sequence
  MISC_FEATURE (10)..(10): Xaa is phenylalanine, tyrosine, valine, leucine, isoleucine, methionine, or an amino acid residue which is covalently linked to another amino acid residue of the sequence
  MISC_FEATURE (11)..(11): Xaa is alanine, valine, glycine, serine, or an amino acid residue which is covalently linked to another amino acid residue of the sequence
  MISC_FEATURE (12)..(12): Xaa is glutamic acid, aspartic acid, or an amino acid residue which is covalently linked to another amino acid residue of the sequence
  MISC_FEATURE (19)..(19): Xaa is glycine, alanine, serine, or an amino acid residue which is covalently linked to another amino acid residue of the sequence
  MISC_FEATURE (20)..(20): Xaa is alanine, valine, glycine, serine, or an amino acid residue which is covalently linked to another amino acid residue of the sequence
  MISC_FEATURE (21)..(21): Xaa is isoleucine, leucine, valine, phenylalanine, methionine, or an amino acid residue which is covalently linked to another amino acid residue of the sequence
  MISC_FEATURE (22)..(22): Xaa is isoleucine, leucine, valine, phenylalanine, methionine, or an amino acid residue which is covalently linked to another amino acid residue of the sequence
  MISC_FEATURE (23)..(23): Xaa is glycine, alanine, serine, or an amino acid residue which is covalently linked to another amino acid residue of the sequence
  MISC_FEATURE (24)..(24): Xaa is leucine, isoleucine, valine, phenylalanine, methionine, or an amino acid residue which is covalently linked to another amino acid residue of the sequence
EVHHQKXXXXXXDVGSNKXXXXXX

SEQ ID NO: 578 - protein, 23 aa, Artificial Sequence
  synthetic
  MISC_FEATURE (6)..(6): Xaa is leucine, isoleucine, valine, phenylalanine, methionine, or an amino acid residue which is covalently linked to another amino acid residue of the sequence
  MISC_FEATURE (7)..(7): Xaa is valine, leucine, isoleucine, alanine, methionine, or an amino acid residue which is covalently linked to another amino acid residue of the sequence
  MISC_FEATURE (8)..(8): Xaa is phenylalanine, tyrosine, valine, leucine, isoleucine, methionine, or an amino acid residue which is covalently linked to another amino acid residue of the sequence
  MISC_FEATURE (9)..(9): Xaa is phenylalanine, tyrosine, valine, leucine, isoleucine, methionine, or an amino acid residue which is covalently linked to another amino acid residue of the sequence
  MISC_FEATURE (10)..(10): Xaa is alanine, valine, glycine, serine, or an amino acid residue which is covalently linked to another amino acid residue of the sequence
  MISC_FEATURE (11)..(11): Xaa is glutamic acid, aspartic acid, or an amino acid residue which is covalently linked to another amino acid residue of the sequence
  MISC_FEATURE (18)..(18): Xaa is glycine, alanine, serine, or an amino acid residue which is covalently linked to another amino acid residue of the sequence
  MISC_FEATURE (19)..(19): Xaa is alanine, valine, glycine, serine, or an amino acid residue which is covalently linked to another amino acid residue of the sequence
  MISC_FEATURE (20)..(20): Xaa is isoleucine, leucine, valine, phenylalanine, methionine, or an amino acid residue which is covalently linked to another amino acid residue of the sequence
  MISC_FEATURE (21)..(21): Xaa is isoleucine, leucine, valine, phenylalanine, methionine, or an amino acid residue which is covalently linked to another amino acid residue of the sequence
  MISC_FEATURE (22)..(22): Xaa is glycine, alanine, serine, or an amino acid residue which is covalently linked to another amino acid residue of the sequence
  MISC_FEATURE (23)..(23): Xaa is leucine, isoleucine, valine, phenylalanine, methionine, or an amino acid residue which is covalently linked to another amino acid residue of the sequence
VHHQKXXXXXXDVGSNKXXXXXX

SEQ ID NO: 579 - protein, 22 aa, Artificial Sequence
  synthetic
  MISC_FEATURE (5)..(5): Xaa is leucine, isoleucine, valine, phenylalanine, methionine, or an amino acid residue which is covalently linked to another amino acid residue of the sequence
  MISC_FEATURE (6)..(6): Xaa is valine, leucine, isoleucine, alanine, methionine, or an amino acid residue which is covalently linked to another amino acid residue of the sequence
  MISC_FEATURE (7)..(7): Xaa is phenylalanine, tyrosine, valine, leucine, isoleucine, methionine, or an amino acid residue which is covalently linked to another amino acid residue of the sequence
  MISC_FEATURE (8)..(8): Xaa is phenylalanine, tyrosine, valine, leucine, isoleucine, methionine, or an amino acid residue which is covalently linked to another amino acid residue of the sequence
  MISC_FEATURE (9)..(9): Xaa is alanine, valine, glycine, serine, or an amino acid residue which is covalently linked to another amino acid residue of the sequence
  MISC_FEATURE (10)..(10): Xaa is glutamic acid, aspartic acid, or an amino acid residue which is covalently linked to another amino acid residue of the sequence
  MISC_FEATURE (17)..(17): Xaa is glycine, alanine, serine, or an amino acid residue which is covalently linked to another amino acid residue of the sequence
  MISC_FEATURE (18)..(18): Xaa is alanine, valine, glycine, serine, or an amino acid residue which is covalently linked to another amino acid residue of the sequence
  MISC_FEATURE (19)..(19): Xaa is isoleucine, leucine, valine, phenylalanine, methionine, or an amino acid residue which is covalently linked to another amino acid residue of the sequence
  MISC_FEATURE (20)..(20): Xaa is isoleucine, leucine, valine, phenylalanine, methionine, or an amino acid residue which is covalently linked to another amino acid residue of the sequence
  MISC_FEATURE (21)..(21): Xaa is glycine, alanine, serine, or an amino acid residue which is covalently linked to another amino acid residue of the sequence
  MISC_FEATURE (22)..(22): Xaa is leucine, isoleucine, valine, phenylalanine, methionine, or an amino acid residue which is covalently linked to another amino acid residue of the sequence
HHQKXXXXXXDVGSNKXXXXXX

SEQ ID NO: 580 - protein, 21 aa, Artificial Sequence
  synthetic
  MISC_FEATURE (4)..(4): Xaa is leucine, isoleucine, valine, phenylalanine, methionine, or an amino acid residue which is covalently linked to another amino acid residue of the sequence
  MISC_FEATURE (5)..(5): Xaa is valine, leucine, isoleucine, alanine, methionine, or an amino acid residue which is covalently linked to another amino acid residue of the sequence
  MISC_FEATURE (6)..(6): Xaa is phenylalanine, tyrosine, valine, leucine, isoleucine, methionine, or an amino acid residue which is covalently linked to another amino acid residue of the sequence
  MISC_FEATURE (7)..(7): Xaa is phenylalanine, tyrosine, valine, leucine, isoleucine, methionine, or an amino acid residue which is covalently linked to another amino acid residue of the sequence
  MISC_FEATURE (8)..(8): Xaa is alanine, valine, glycine, serine, or an amino acid residue which is covalently linked to another amino acid residue of the sequence
  MISC_FEATURE (9)..(9): Xaa is glutamic acid, aspartic acid, or an amino acid residue which is covalently linked to another amino acid residue of the sequence
  MISC_FEATURE (16)..(16): Xaa is glycine, alanine, serine, or an amino acid residue which is covalently linked to another amino acid residue of the sequence
  MISC_FEATURE (17)..(17): Xaa is alanine, valine, glycine, serine, or an amino acid residue which is covalently linked to another amino acid residue of the sequence
  MISC_FEATURE (18)..(18): Xaa is isoleucine, leucine, valine, phenylalanine, methionine, or an amino acid residue which is covalently linked to another amino acid residue of the sequence
  MISC_FEATURE (19)..(19): Xaa is isoleucine, leucine, valine, phenylalanine, methionine, or an amino acid residue which is covalently linked to another amino acid residue of the sequence
  MISC_FEATURE (20)..(20): Xaa is glycine, alanine, serine, or an amino acid residue which is covalently linked to another amino acid residue of the sequence
  MISC_FEATURE (21)..(21): Xaa is leucine, isoleucine, valine, phenylalanine, methionine, or an amino acid residue which is covalently linked to another amino acid residue of the sequence
HQKXXXXXXDVGSNKXXXXXX

SEQ ID NO: 581 - protein, 20 aa, Artificial Sequence
  synthetic
  MISC_FEATURE (3)..(3): Xaa is leucine, isoleucine, valine, phenylalanine, methionine, or an amino acid residue which is covalently linked to another amino acid residue of the sequence
  MISC_FEATURE (4)..(4): Xaa is valine, leucine, isoleucine, alanine, methionine, or an amino acid residue which is covalently linked to another amino acid residue of the sequence
  MISC_FEATURE (5)..(5): Xaa is phenylalanine, tyrosine, valine, leucine, isoleucine, methionine, or an amino acid residue which is covalently linked to another amino acid residue of the sequence
  MISC_FEATURE (6)..(6): Xaa is phenylalanine, tyrosine, valine, leucine, isoleucine, methionine, or an amino acid residue which is covalently linked to another amino acid residue of the sequence
  MISC_FEATURE (7)..(7): Xaa is alanine, valine, glycine, serine, or an amino acid residue which is covalently linked to another amino acid residue of the sequence
  MISC_FEATURE (8)..(8): Xaa is glutamic acid, aspartic acid, or an amino acid residue which is covalently linked to another amino acid residue of the sequence
  MISC_FEATURE (15)..(15): Xaa is glycine, alanine, serine, or an amino acid residue which is covalently linked to another amino acid residue of the sequence
  MISC_FEATURE (16)..(16): Xaa is alanine, valine, glycine, serine, or an amino acid residue which is covalently linked to another amino acid residue of the sequence
  MISC_FEATURE (17)..(17): Xaa is isoleucine, leucine, valine, phenylalanine, methionine, or an amino acid residue which is covalently linked to another amino acid residue of the sequence
  MISC_FEATURE (18)..(18): Xaa is isoleucine, leucine, valine, phenylalanine, methionine, or an amino acid residue which is covalently linked to another amino acid residue of the sequence
  MISC_FEATURE (19)..(19): Xaa is glycine, alanine, serine, or an amino acid residue which is covalently linked to another amino acid residue of the sequence
  MISC_FEATURE (20)..(20): Xaa is leucine, isoleucine, valine, phenylalanine, methionine, or an amino acid residue which is covalently linked to another amino acid residue of the sequence
QKXXXXXXDVGSNKXXXXXX

SEQ ID NO: 582 - protein, 19 aa, Artificial Sequence
  synthetic
  MISC_FEATURE (2)..(2): Xaa is leucine, isoleucine, valine, phenylalanine, methionine, or an amino acid residue which is covalently linked to another amino acid residue of the sequence
  MISC_FEATURE (3)..(3): Xaa is valine, leucine, isoleucine, alanine, methionine, or an amino acid residue which is covalently linked to another amino acid residue of the sequence
  MISC_FEATURE (4)..(4): Xaa is phenylalanine, tyrosine, valine, leucine, isoleucine, methionine, or an amino acid residue which is covalently linked to another amino acid residue of the sequence
  MISC_FEATURE (5)..(5): Xaa is phenylalanine, tyrosine, valine, leucine, isoleucine, methionine, or an amino acid residue which is covalently linked to another amino acid residue of the sequence
  MISC_FEATURE (6)..(6): Xaa is alanine, valine, glycine, serine, or an amino acid residue which is covalently linked to another amino acid residue of the sequence
  MISC_FEATURE (7)..(7): Xaa is glutamic acid, aspartic acid, or an amino acid residue which is covalently linked to another amino acid residue of the sequence
  MISC_FEATURE (14)..(14): Xaa is glycine, alanine, serine, or an amino acid residue which is covalently linked to another amino acid residue of the sequence
  MISC_FEATURE (15)..(15): Xaa is alanine, valine, glycine, serine, or an amino acid residue which is covalently linked to another amino acid residue of the sequence
  MISC_FEATURE (16)..(16): Xaa is isoleucine, leucine, valine, phenylalanine, methionine, or an amino acid residue which is covalently linked to another amino acid residue of the sequence
  MISC_FEATURE (17)..(17): Xaa is isoleucine, leucine, valine, phenylalanine, methionine, or an amino acid residue which is covalently linked to another amino acid residue of the sequence
  MISC_FEATURE (18)..(18): Xaa is glycine, alanine, serine, or an amino acid residue which is covalently linked to another amino acid residue of the sequence
  MISC_FEATURE (19)..(19): Xaa is leucine, isoleucine, valine, phenylalanine, methionine, or an amino acid residue which is covalently linked to another amino acid residue of the sequence
KXXXXXXDVGSNKXXXXXX

SEQ ID NO: 583 - protein, 18 aa, Artificial Sequence
  synthetic
  MISC_FEATURE (1)..(1): Xaa is leucine, isoleucine, valine, phenylalanine, methionine, or an amino acid residue which is covalently linked to another amino acid residue of the sequence
  MISC_FEATURE (2)..(2): Xaa is valine, leucine, isoleucine, alanine, methionine, or an amino acid residue which is covalently linked to another amino acid residue of the sequence
  MISC_FEATURE (3)..(3): Xaa is phenylalanine, tyrosine, valine, leucine, isoleucine, methionine, or an amino acid residue which is covalently linked to another amino acid residue of the sequence
  MISC_FEATURE (4)..(4): Xaa is phenylalanine, tyrosine, valine, leucine, isoleucine, methionine, or an amino acid residue which is covalently linked to another amino acid residue of the sequence
  MISC_FEATURE (5)..(5): Xaa is alanine, valine, glycine, serine, or an amino acid residue which is covalently linked to another amino acid residue of the sequence
  MISC_FEATURE (6)..(6): Xaa is glutamic acid, aspartic acid, or an amino acid residue which is covalently linked to another amino acid residue of the sequence
  MISC_FEATURE (13)..(13): Xaa is glycine, alanine, serine, or an amino acid residue which is covalently linked to another amino acid residue of the sequence
  MISC_FEATURE (14)..(14): Xaa is alanine, valine, glycine, serine, or an amino acid residue which is covalently linked to another amino acid residue of the sequence
  MISC_FEATURE (15)..(15): Xaa is isoleucine, leucine, valine, phenylalanine, methionine, or an amino acid residue which is covalently linked to another amino acid residue of the sequence
  MISC_FEATURE (16)..(16): Xaa is isoleucine, leucine, valine, phenylalanine, methionine, or an amino acid residue which is covalently linked to another amino acid residue of the sequence
  MISC_FEATURE (17)..(17): Xaa is glycine, alanine, serine, or an amino acid residue which is covalently linked to another amino acid residue of the sequence
  MISC_FEATURE (18)..(18): Xaa is leucine, isoleucine, valine, phenylalanine, methionine, or an amino acid residue which is covalently linked to another amino acid residue of the sequence
XXXXXXDVGSNKXXXXXX

SEQ ID NO: 584 - protein, 17 aa, Artificial Sequence
  synthetic
  MISC_FEATURE (1)..(1): Xaa is valine, leucine, isoleucine, alanine, methionine, or an amino acid residue which is covalently linked to another amino acid residue of the sequence
  MISC_FEATURE (2)..(2): Xaa is phenylalanine, tyrosine, valine, leucine, isoleucine, methionine, or an amino acid residue which is covalently linked to another amino acid residue of the sequence
  MISC_FEATURE (3)..(3): Xaa is phenylalanine, tyrosine, valine, leucine, isoleucine, methionine, or an amino acid residue which is covalently linked to another amino acid residue of the sequence
  MISC_FEATURE (4)..(4): Xaa is alanine, valine, glycine, serine, or an amino acid residue which is covalently linked to another amino acid residue of the sequence
  MISC_FEATURE (5)..(5): Xaa is glutamic acid, aspartic acid, or an amino acid residue which is covalently linked to another amino acid residue of the sequence
  MISC_FEATURE (12)..(12): Xaa is glycine, alanine, serine, or an amino acid residue which is covalently linked to another amino acid residue of the sequence
  MISC_FEATURE (13)..(13): Xaa is alanine, valine, glycine, serine, or an amino acid residue which is covalently linked to another amino acid residue of the sequence
  MISC_FEATURE (14)..(14): Xaa is isoleucine, leucine, valine, phenylalanine, methionine, or an amino acid residue which is covalently linked to another amino acid residue of the sequence
  MISC_FEATURE (15)..(15): Xaa is isoleucine, leucine, valine, phenylalanine, methionine, or an amino acid residue which is covalently linked to another amino acid residue of the sequence
  MISC_FEATURE (16)..(16): Xaa is glycine, alanine, serine, or an amino acid residue which is covalently linked to another amino acid residue of the sequence
XXXXXDVGSNKXXXXXL

SEQ ID NO: 585 - protein, 16 aa, Artificial Sequence
  synthetic
  MISC_FEATURE (1)..(1): Xaa is phenylalanine, tyrosine, valine, leucine, isoleucine, methionine, or an amino acid residue which is covalently linked to another amino acid residue of the sequence
  MISC_FEATURE (2)..(2): Xaa is phenylalanine, tyrosine, valine, leucine, isoleucine, methionine, or an amino acid residue which is covalently linked to another amino acid residue of the sequence
  MISC_FEATURE (3)..(3): Xaa is alanine, valine, glycine, serine, or an amino acid residue which is covalently linked to another amino acid residue of the sequence
  MISC_FEATURE (4)..(4): Xaa is glutamic acid, aspartic acid, or an amino acid residue which is covalently linked to another amino acid residue of the sequence
  MISC_FEATURE (11)..(11): Xaa is glycine, alanine, serine, or an amino acid residue which is covalently linked to another amino acid residue of the sequence
  MISC_FEATURE (12)..(12): Xaa is alanine, valine, glycine, serine, or an amino acid residue which is covalently linked to another amino acid residue of the sequence
  MISC_FEATURE (13)..(13): Xaa is isoleucine, leucine, valine, phenylalanine, methionine, or an amino acid residue which is covalently linked to another amino acid residue of the sequence
  MISC_FEATURE (14)..(14): Xaa is isoleucine, leucine, valine, phenylalanine, methionine, or an amino acid residue which is covalently linked to another amino acid residue of the sequence
XXXXDVGSNKXXXXGL

SEQ ID NO: 586 - protein, 15 aa, Artificial Sequence
  synthetic
  MISC_FEATURE (1)..(1): Xaa is phenylalanine, tyrosine, valine, leucine, isoleucine, methionine, or an amino acid residue which is covalently linked to another amino acid residue of the sequence
  MISC_FEATURE (2)..(2): Xaa is alanine, valine, glycine, serine, or an amino acid residue which is covalently linked to another amino acid residue of the sequence
  MISC_FEATURE (3)..(3): Xaa is glutamic acid, aspartic acid, or an amino acid residue which is covalently linked to another amino acid residue of the sequence
  MISC_FEATURE (10)..(10): Xaa is glycine, alanine, serine, or an amino acid residue which is covalently linked to another amino acid residue of the sequence
  MISC_FEATURE (11)..(11): Xaa is alanine, valine, glycine, serine, or an amino acid residue which is covalently linked to another amino acid residue of the sequence
  MISC_FEATURE (12)..(12): Xaa is isoleucine, leucine, valine, phenylalanine, methionine, or an amino acid residue which is covalently linked to another amino acid residue of the sequence
XXXDVGSNKXXXIGL

SEQ ID NO: 587 - protein, 14 aa, Artificial Sequence
  synthetic
  MISC_FEATURE (1)..(1): Xaa is alanine, valine, glycine, serine, or an amino acid residue which is covalently linked to another amino acid residue of the sequence
  MISC_FEATURE (2)..(2): Xaa is glutamic acid, aspartic acid, or an amino acid residue which is covalently linked to another amino acid residue of the sequence
  MISC_FEATURE (9)..(9): Xaa is glycine, alanine, serine, or an amino acid residue which is covalently linked to another amino acid residue of the sequence
  MISC_FEATURE (10)..(10): Xaa is alanine, valine, glycine, serine, or an amino acid residue which is covalently linked to another amino acid residue of the sequence
XXDVGSNKXXIIGL

SEQ ID NO: 588 - protein, 13 aa, Artificial Sequence
  synthetic
  MISC_FEATURE (1)..(1): Xaa is glutamic acid, aspartic acid, or an amino acid residue which is covalently linked to another amino acid residue of the sequence
  MISC_FEATURE (8)..(8): Xaa is glycine, alanine, serine, or an amino acid residue which is covalently linked to another amino acid residue of the sequence
XDVGSNKXAIIGL

SEQ ID NO: 589 - protein, 33 aa, Artificial Sequence
  synthetic
  MISC_FEATURE (18)..(18): Xaa is valine, leucine, isoleucine, alanine, methionine, or an amino acid residue which is covalently linked to another amino acid residue of the sequence
  MISC_FEATURE (19)..(19): Xaa is phenylalanine, tyrosine, valine, leucine, isoleucine, methionine, or an amino acid residue which is covalently linked to another amino acid residue of the sequence
  MISC_FEATURE (20)..(20): Xaa is phenylalanine, tyrosine, valine, leucine, isoleucine, methionine, or an amino acid residue which is covalently linked to another amino acid residue of the sequence
  MISC_FEATURE (21)..(21): Xaa is alanine, valine, glycine, serine, or an amino acid residue which is covalently linked to another amino acid residue of the sequence
  MISC_FEATURE (22)..(22): Xaa is glutamic acid, aspartic acid, or an amino acid residue which is covalently linked to another amino acid residue of the sequence
  MISC_FEATURE (29)..(29): Xaa is glycine, alanine, serine, or an amino acid residue which is covalently linked to another amino acid residue of the sequence
  MISC_FEATURE (30)..(30): Xaa is alanine, valine, glycine, serine, or an amino acid residue which is covalently linked to another amino acid residue of the sequence
  MISC_FEATURE (31)..(31): Xaa is isoleucine, leucine, valine, phenylalanine, methionine, or an amino acid residue which is covalently linked to another amino acid residue of the sequence
  MISC_FEATURE (32)..(32): Xaa is isoleucine, leucine, valine, phenylalanine, methionine, or an amino acid residue which is covalently linked to another amino acid residue of the sequence
  MISC_FEATURE (33)..(33): Xaa is glycine, alanine, serine, or an amino acid residue which is covalently linked to another amino acid residue of the sequence
DAEFRHDSGYEVHHQKLXXXXXDVGSNKXXXXX

SEQ ID NO: 590 - protein, 32 aa, Artificial Sequence
  synthetic
  MISC_FEATURE (17)..(17): Xaa is valine, leucine, isoleucine, alanine, methionine, or an amino acid residue which is covalently linked to another amino acid residue of the sequence
  MISC_FEATURE (18)..(18): Xaa is phenylalanine, tyrosine, valine, leucine, isoleucine, methionine, or an amino acid residue which is covalently linked to another amino acid residue of the sequence
  MISC_FEATURE (19)..(19): Xaa is phenylalanine, tyrosine, valine, leucine, isoleucine, methionine, or an amino acid residue which is covalently linked to another amino acid residue of the sequence
  MISC_FEATURE (20)..(20): Xaa is alanine, valine, glycine, serine, or an amino acid residue which is covalently linked to another amino acid residue of the sequence
  MISC_FEATURE (21)..(21): Xaa is glutamic acid, aspartic acid, or an amino acid residue which is covalently linked to another amino acid residue of the sequence
  MISC_FEATURE (28)..(28): Xaa is glycine, alanine, serine, or an amino acid residue which is covalently linked to another amino acid residue of the sequence
  MISC_FEATURE (29)..(29): Xaa is alanine, valine, glycine, serine, or an amino acid residue which is covalently linked to another amino acid residue of the sequence
  MISC_FEATURE (30)..(30): Xaa is isoleucine, leucine, valine, phenylalanine, methionine, or an amino acid residue which is covalently linked to another amino acid residue of the sequence
  MISC_FEATURE (31)..(31): Xaa is isoleucine, leucine, valine, phenylalanine, methionine, or an amino acid residue which is covalently linked to another amino acid residue of the sequence
  MISC_FEATURE (32)..(32): Xaa is glycine, alanine, serine, or an amino acid residue which is covalently linked to another amino acid residue of the sequence
AEFRHDSGYEVHHQKLXXXXXDVGSNKXXXXX

SEQ ID NO: 591 - protein, 31 aa, Artificial Sequence
  synthetic
  MISC_FEATURE (16)..(16): Xaa is valine, leucine, isoleucine, alanine, methionine, or an amino acid residue which is covalently linked to another amino acid residue of the sequence
  MISC_FEATURE (17)..(17): Xaa is phenylalanine, tyrosine, valine, leucine, isoleucine, methionine, or an amino acid residue which is covalently linked to another amino acid residue of the sequence
  MISC_FEATURE (18)..(18): Xaa is phenylalanine, tyrosine, valine, leucine, isoleucine, methionine, or an amino acid residue which is covalently linked to another amino acid residue of the sequence
  MISC_FEATURE (19)..(19): Xaa is alanine, valine, glycine, serine, or an amino acid residue which is covalently linked to another amino acid residue of the sequence
  MISC_FEATURE (20)..(20): Xaa is glutamic acid, aspartic acid, or an amino acid residue which is covalently linked to another amino acid residue of the sequence
  MISC_FEATURE (27)..(27): Xaa is glycine, alanine, serine, or an amino acid residue which is covalently linked to another amino acid residue of the sequence
  MISC_FEATURE (28)..(28): Xaa is alanine, valine, glycine, serine, or an amino acid residue which is covalently linked to another amino acid residue of the sequence
  MISC_FEATURE (29)..(29): Xaa is isoleucine, leucine, valine, phenylalanine, methionine, or an amino acid residue which is covalently linked to another amino acid residue of the sequence
  MISC_FEATURE (30)..(30): Xaa is isoleucine, leucine, valine, phenylalanine, methionine, or an amino acid residue which is covalently linked to another amino acid residue of the sequence
  MISC_FEATURE (31)..(31): Xaa is glycine, alanine, serine, or an amino acid residue which is covalently linked to another amino acid residue of the sequence
EFRHDSGYEVHHQKLXXXXXDVGSNKXXXXX

SEQ ID NO: 592 - protein, 30 aa, Artificial Sequence
  synthetic
  MISC_FEATURE (15)..(15): Xaa is valine, leucine, isoleucine, alanine, methionine, or an amino acid residue which is covalently linked to another amino acid residue of the sequence
  MISC_FEATURE (16)..(16): Xaa is phenylalanine, tyrosine, valine, leucine, isoleucine, methionine, or an amino acid residue which is covalently linked to another amino acid residue of the sequence
  MISC_FEATURE (17)..(17): Xaa is phenylalanine, tyrosine, valine, leucine, isoleucine, methionine, or an amino acid residue which is covalently linked to another amino acid residue of the sequence
  MISC_FEATURE (18)..(18): Xaa is alanine, valine, glycine, serine, or an amino acid residue which is covalently linked to another amino acid residue of the sequence
  MISC_FEATURE (19)..(19): Xaa is glutamic acid, aspartic acid, or an amino acid residue which is covalently linked to another amino acid residue of the sequence
  MISC_FEATURE (26)..(26): Xaa is glycine, alanine, serine, or an amino acid residue which is covalently linked to another amino acid residue of the sequence
  MISC_FEATURE (27)..(27): Xaa is alanine, valine, glycine, serine, or an amino acid residue which is covalently linked to another amino acid residue of the sequence
  MISC_FEATURE (28)..(28): Xaa is isoleucine, leucine, valine, phenylalanine, methionine, or an amino acid residue which is covalently linked to another amino acid residue of the sequence
  MISC_FEATURE (29)..(29): Xaa is isoleucine, leucine, valine, phenylalanine, methionine, or an amino acid residue which is covalently linked to another amino acid residue of the sequence
  MISC_FEATURE (30)..(30): Xaa is glycine, alanine, serine, or an amino acid residue which is covalently linked to another amino acid residue of the sequence
FRHDSGYEVHHQKLXXXXXDVGSNKXXXXX

SEQ ID NO: 593 - protein, 29 aa, Artificial Sequence
  synthetic
  MISC_FEATURE (14)..(14): Xaa is valine, leucine, isoleucine, alanine, methionine, or an amino acid residue which is covalently linked to another amino acid residue of the sequence
  MISC_FEATURE (15)..(15): Xaa is phenylalanine, tyrosine, valine, leucine, isoleucine, methionine, or an amino acid residue which is covalently linked to another amino acid residue of the sequence
  MISC_FEATURE (16)..(16): Xaa is phenylalanine, tyrosine, valine, leucine, isoleucine, methionine, or an amino acid residue which is covalently linked to another amino acid residue of the sequence
  MISC_FEATURE (17)..(17): Xaa is alanine, valine, glycine, serine, or an amino acid residue which is covalently linked to another amino acid residue of the sequence
  MISC_FEATURE (18)..(18): Xaa is glutamic acid, aspartic acid, or an amino acid residue which is covalently linked to another amino acid residue of the sequence
  MISC_FEATURE (25)..(25): Xaa is glycine, alanine, serine, or an amino acid residue which is covalently linked to another amino acid residue of the sequence
  MISC_FEATURE (26)..(26): Xaa is alanine, valine, glycine, serine, or an amino acid residue which is covalently linked to another amino acid residue of the sequence
  MISC_FEATURE (27)..(27): Xaa is isoleucine, leucine, valine, phenylalanine, methionine, or an amino acid residue which is covalently linked to another amino acid residue of the sequence
  MISC_FEATURE (28)..(28): Xaa is isoleucine, leucine, valine, phenylalanine, methionine, or an amino acid residue which is covalently linked to another amino acid residue of the sequence
  MISC_FEATURE (29)..(29): Xaa is glycine, alanine, serine, or an amino acid residue which is covalently linked to another amino acid residue of the sequence
RHDSGYEVHHQKLXXXXXDVGSNKXXXXX

SEQ ID NO: 594 - protein, 28 aa, Artificial Sequence
  synthetic
  MISC_FEATURE (13)..(13): Xaa is valine, leucine, isoleucine, alanine, methionine, or an amino acid residue which is covalently linked to another amino acid residue of the sequence
  MISC_FEATURE (14)..(14): Xaa is phenylalanine, tyrosine, valine, leucine, isoleucine, methionine, or an amino acid residue which is covalently linked to another amino acid residue of the sequence
  MISC_FEATURE (15)..(15): Xaa is phenylalanine, tyrosine, valine, leucine, isoleucine, methionine, or an amino acid residue which is covalently linked to another amino acid residue of the sequence
  MISC_FEATURE (16)..(16): Xaa is alanine, valine, glycine, serine, or an amino acid residue which is covalently linked to another amino acid residue of the sequence
  MISC_FEATURE (17)..(17): Xaa is glutamic acid, aspartic acid, or an amino acid residue which is covalently linked to another amino acid residue of the sequence
  MISC_FEATURE (24)..(24): Xaa is glycine, alanine, serine, or an amino acid residue which is covalently linked to another amino acid residue of the sequence
  MISC_FEATURE (25)..(25): Xaa is alanine, valine, glycine, serine, or an amino acid residue which is covalently linked to another amino acid residue of the sequence
  MISC_FEATURE (26)..(26): Xaa is isoleucine, leucine, valine, phenylalanine, methionine, or an amino acid residue which is covalently linked to another amino acid residue of the sequence
  MISC_FEATURE (27)..(27): Xaa is isoleucine, leucine, valine, phenylalanine, methionine, or an amino acid residue which is covalently linked to another amino acid residue of the sequence
  MISC_FEATURE (28)..(28): Xaa is glycine, alanine, serine, or an amino acid residue which is covalently linked to another amino acid residue of the sequence
HDSGYEVHHQKLXXXXXDVGSNKXXXXX

SEQ ID NO: 595 - protein, 27 aa, Artificial Sequence
  synthetic
  MISC_FEATURE (12)..(12): Xaa is valine, leucine, isoleucine, alanine, methionine, or an amino acid residue which is covalently linked to another amino acid residue of the sequence
  MISC_FEATURE (13)..(13): Xaa is phenylalanine, tyrosine, valine, leucine, isoleucine, methionine, or an amino acid residue which is covalently linked to another amino acid residue of the sequence
  MISC_FEATURE (14)..(14): Xaa is phenylalanine, tyrosine, valine, leucine, isoleucine, methionine, or an amino acid residue which is covalently linked to another amino acid residue of the sequence
  MISC_FEATURE (15)..(15): Xaa is alanine, valine, glycine, serine, or an amino acid residue which is covalently linked to another amino acid residue of the sequence
  MISC_FEATURE (16)..(16): Xaa is glutamic acid, aspartic acid, or an amino acid residue which is covalently linked to another amino acid residue of the sequence
  MISC_FEATURE (23)..(23): Xaa is glycine, alanine, serine, or an amino acid residue which is covalently linked to another amino acid residue of the sequence
  MISC_FEATURE (24)..(24): Xaa is alanine, valine, glycine, serine, or an amino acid residue which is covalently linked to another amino acid residue of the sequence
  MISC_FEATURE (25)..(25): Xaa is isoleucine, leucine, valine, phenylalanine, methionine, or an amino acid residue which is covalently linked to another amino acid residue of the sequence
  MISC_FEATURE (26)..(26): Xaa is isoleucine, leucine, valine, phenylalanine, methionine, or an amino acid residue which is covalently linked to another amino acid residue of the sequence
  MISC_FEATURE (27)..(27): Xaa is glycine, alanine, serine, or an amino acid residue which is covalently linked to another amino acid residue of the sequence
DSGYEVHHQKLXXXXXDVGSNKXXXXX

SEQ ID NO: 596 - protein, 26 aa, Artificial Sequence
  synthetic
  MISC_FEATURE (11)..(11): Xaa is valine, leucine, isoleucine, alanine, methionine, or an amino acid residue which is covalently linked to another amino acid residue of the sequence
  MISC_FEATURE (12)..(12): Xaa is phenylalanine, tyrosine, valine, leucine, isoleucine, methionine, or an amino acid residue which is covalently linked to another amino acid residue of the sequence
  MISC_FEATURE (13)..(13): Xaa is phenylalanine, tyrosine, valine, leucine, isoleucine, methionine, or an amino acid residue which is covalently linked to another amino acid residue of the sequence
  MISC_FEATURE (14)..(14): Xaa is alanine, valine, glycine, serine, or an amino acid residue which is covalently linked to another amino acid residue of the sequence
  MISC_FEATURE (15)..(15): Xaa is glutamic acid, aspartic acid, or an amino acid residue which is covalently linked to another amino acid residue of the sequence
  MISC_FEATURE (22)..(22): Xaa is glycine, alanine, serine, or an amino acid residue which is covalently linked to another amino acid residue of the sequence
  MISC_FEATURE (23)..(23): Xaa is alanine, valine, glycine, serine, or an amino acid residue which is covalently linked to another amino acid residue of the sequence
  MISC_FEATURE (24)..(24): Xaa is isoleucine, leucine, valine, phenylalanine, methionine, or an amino acid residue which is covalently linked to another amino acid residue of the sequence
  MISC_FEATURE (25)..(25): Xaa is isoleucine, leucine, valine, phenylalanine, methionine, or an amino acid residue which is covalently linked to another amino acid residue of the sequence
  MISC_FEATURE (26)..(26): Xaa is glycine, alanine, serine, or an amino acid residue which is covalently linked to another amino acid residue of the sequence
SGYEVHHQKLXXXXXDVGSNKXXXXX

SEQ ID NO: 597 - protein, 25 aa, Artificial Sequence
  synthetic
  MISC_FEATURE (10)..(10): Xaa is valine, leucine, isoleucine, alanine, methionine, or an amino acid residue which is covalently linked to another amino acid residue of the sequence
  MISC_FEATURE (11)..(11): Xaa is phenylalanine, tyrosine, valine, leucine, isoleucine, methionine, or an amino acid residue which is covalently linked to another amino acid residue of the sequence
  MISC_FEATURE (12)..(12): Xaa is phenylalanine, tyrosine, valine, leucine, isoleucine, methionine, or an amino acid residue which is covalently linked to another amino acid residue of the sequence
  MISC_FEATURE (13)..(13): Xaa is alanine, valine, glycine, serine, or an amino acid residue which is covalently linked to another amino acid residue of the sequence
  MISC_FEATURE (14)..(14): Xaa is glutamic acid, aspartic acid, or an amino acid residue which is covalently linked to another amino acid residue of the sequence
  MISC_FEATURE (21)..(21): Xaa is glycine, alanine, serine, or an amino acid residue which is covalently linked to another amino acid residue of the sequence
  MISC_FEATURE (22)..(22): Xaa is alanine, valine, glycine, serine, or an amino acid residue which is covalently linked to another amino acid residue of the sequence
  MISC_FEATURE (23)..(23): Xaa is isoleucine, leucine, valine, phenylalanine, methionine, or an amino acid residue which is covalently linked to another amino acid residue of the sequence
  MISC_FEATURE (24)..(24): Xaa is isoleucine, leucine, valine, phenylalanine, methionine, or an amino acid residue which is covalently linked to another amino acid residue of the sequence
  MISC_FEATURE (25)..(25): Xaa is glycine, alanine, serine, or an amino acid residue which is covalently linked to another amino acid residue of the sequence
GYEVHHQKLXXXXXDVGSNKXXXXX

SEQ ID NO: 598 - protein, 24 aa, Artificial Sequence
  synthetic
  MISC_FEATURE (9)..(9): Xaa is valine, leucine, isoleucine, alanine, methionine, or an amino acid residue which is covalently linked to another amino acid residue of the sequence
  MISC_FEATURE (10)..(10): Xaa is phenylalanine, tyrosine, valine, leucine, isoleucine, methionine, or an amino acid residue which is covalently linked to another amino acid residue of the sequence
  MISC_FEATURE (11)..(11): Xaa is phenylalanine, tyrosine, valine, leucine, isoleucine, methionine, or an amino acid residue which is covalently linked to another amino acid residue of the sequence
  MISC_FEATURE (12)..(12): Xaa is alanine, valine, glycine, serine, or an amino acid residue which is covalently linked to another amino acid residue of the sequence
  MISC_FEATURE (13)..(13): Xaa is glutamic acid, aspartic acid, or an amino acid residue which is covalently linked to another amino acid residue of the sequence
  MISC_FEATURE (20)..(20): Xaa is glycine, alanine, serine, or an amino acid residue which is covalently linked to another amino acid residue of the sequence
  MISC_FEATURE (21)..(21): Xaa is alanine, valine, glycine, serine, or an amino acid residue which is covalently linked to another amino acid residue of the sequence
  MISC_FEATURE (22)..(22): Xaa is isoleucine, leucine, valine, phenylalanine, methionine, or an amino acid residue which is covalently linked to another amino acid residue of the sequence
  MISC_FEATURE (23)..(23): Xaa is isoleucine, leucine, valine, phenylalanine, methionine, or an amino acid residue which is covalently linked to another amino acid residue of the sequence
  MISC_FEATURE (24)..(24): Xaa is glycine, alanine, serine, or an amino acid residue which is covalently linked to another amino acid residue of the sequence
YEVHHQKLXXXXXDVGSNKXXXXX

SEQ ID NO: 599 - protein, 23 aa, Artificial Sequence
  synthetic
  MISC_FEATURE (8)..(8): Xaa is valine, leucine, isoleucine, alanine, methionine, or an amino acid residue which is covalently linked to another amino acid residue of the sequence
  MISC_FEATURE (9)..(9): Xaa is phenylalanine, tyrosine, valine, leucine, isoleucine, methionine, or an amino acid residue which is covalently linked to another amino acid residue of the sequence
  MISC_FEATURE (10)..(10): Xaa is phenylalanine, tyrosine, valine, leucine, isoleucine, methionine, or an amino acid residue which is covalently linked to another amino acid residue of the sequence
  MISC_FEATURE (11)..(11): Xaa is alanine, valine, glycine, serine, or an amino acid residue which is covalently linked to another amino acid residue of the sequence
  MISC_FEATURE (12)..(12): Xaa is glutamic acid, aspartic acid, or an amino acid residue which is covalently linked to another amino acid residue of the sequence
  MISC_FEATURE (19)..(19): Xaa is glycine, alanine, serine, or an amino acid residue which is covalently linked to another amino acid residue of the sequence
  MISC_FEATURE (20)..(20): Xaa is alanine, valine, glycine, serine, or an amino acid residue which is covalently linked to another amino acid residue of the sequence
  MISC_FEATURE (21)..(21): Xaa is isoleucine, leucine, valine, phenylalanine, methionine, or an amino acid residue which is covalently linked to another amino acid residue of the sequence
  MISC_FEATURE (22)..(22): Xaa is isoleucine, leucine, valine, phenylalanine, methionine, or an amino acid residue which is covalently linked to another amino acid residue of the sequence
  MISC_FEATURE (23)..(23): Xaa is glycine, alanine, serine, or an amino acid residue which is covalently linked to another amino acid residue of the sequence
EVHHQKLXXXXXDVGSNKXXXXX

SEQ ID NO: 600 - protein, 22 aa, Artificial Sequence
  synthetic
  MISC_FEATURE (7)..(7): Xaa is valine, leucine, isoleucine, alanine, methionine, or an amino acid residue which is covalently linked to another amino acid residue of the sequence
  MISC_FEATURE (8)..(8): Xaa is phenylalanine, tyrosine, valine, leucine, isoleucine, methionine, or an amino acid residue which is covalently linked to another amino acid residue of the sequence
  MISC_FEATURE (9)..(9): Xaa is phenylalanine, tyrosine, valine, leucine, isoleucine, methionine, or an amino acid residue which is covalently linked to another amino acid residue of the sequence
  MISC_FEATURE (10)..(10): Xaa is alanine, valine, glycine, serine, or an amino acid residue which is covalently linked to another amino acid residue of the sequence
  MISC_FEATURE (11)..(11): Xaa is glutamic acid, aspartic acid, or an amino acid residue which is covalently linked to another amino acid residue of the sequence
  MISC_FEATURE (18)..(18): Xaa is glycine, alanine, serine, or an amino acid residue which is covalently linked to another amino acid residue of the sequence
  MISC_FEATURE (19)..(19): Xaa is alanine, valine, glycine, serine, or an amino acid residue which is covalently linked to another amino acid residue of the sequence
  MISC_FEATURE (20)..(20): Xaa is isoleucine, leucine, valine, phenylalanine, methionine, or an amino acid residue which is covalently linked to another amino acid residue of the sequence
  MISC_FEATURE (21)..(21): Xaa is isoleucine, leucine, valine, phenylalanine, methionine, or an amino acid residue which is covalently linked to another amino acid residue of the sequence
  MISC_FEATURE (22)..(22): Xaa is glycine, alanine, serine, or an amino acid residue which is covalently linked to another amino acid residue of the sequence
VHHQKLXXXXXDVGSNKXXXXX

SEQ ID NO: 601 - protein, 21 aa, Artificial Sequence
  synthetic
  MISC_FEATURE (6)..(6): Xaa is valine, leucine, isoleucine, alanine, methionine, or an amino acid residue which is covalently linked to another amino acid residue of the sequence
  MISC_FEATURE (7)..(7): Xaa is phenylalanine, tyrosine, valine, leucine, isoleucine, methionine, or an amino acid residue which is covalently linked to another amino acid residue of the sequence
  MISC_FEATURE (8)..(8): Xaa is phenylalanine, tyrosine, valine, leucine, isoleucine, methionine, or an amino acid residue which is covalently linked to another amino acid residue of the sequence
  MISC_FEATURE (9)..(9): Xaa is alanine, valine, glycine, serine, or an amino acid residue which is covalently linked to another amino acid residue of the sequence
  MISC_FEATURE (10)..(10): Xaa is glutamic acid, aspartic acid, or an amino acid residue which is covalently linked to another amino acid residue of the sequence
  MISC_FEATURE (17)..(17): Xaa is glycine, alanine, serine, or an amino acid residue which is covalently linked to another amino acid residue of the sequence
  MISC_FEATURE (18)..(18): Xaa is alanine, valine, glycine, serine, or an amino acid residue which is covalently linked to another amino acid residue of the sequence
  MISC_FEATURE (19)..(19): Xaa is isoleucine, leucine, valine, phenylalanine, methionine, or an amino acid residue which is covalently linked to another amino acid residue of the sequence
  MISC_FEATURE (20)..(20): Xaa is isoleucine, leucine, valine, phenylalanine, methionine, or an amino acid residue which is covalently linked to another amino acid residue of the sequence
  MISC_FEATURE (21)..(21): Xaa is glycine, alanine, serine, or an amino acid residue which is covalently linked to another amino acid residue of the sequence
HHQKLXXXXXDVGSNKXXXXX

SEQ ID NO: 602 - protein, 20 aa, Artificial Sequence
  synthetic
  MISC_FEATURE (5)..(5): Xaa is valine, leucine, isoleucine, alanine, methionine, or an amino acid residue which is covalently linked to another amino acid residue of the sequence
  MISC_FEATURE (6)..(6): Xaa is phenylalanine, tyrosine, valine, leucine, isoleucine, methionine, or an amino acid residue which is covalently linked to another amino acid residue of the sequence
  MISC_FEATURE (7)..(7): Xaa is phenylalanine, tyrosine, valine, leucine, isoleucine, methionine, or an amino acid residue which is covalently linked to another amino acid residue of the sequence
  MISC_FEATURE (8)..(8): Xaa is alanine, valine, glycine, serine, or an amino acid residue which is covalently linked to another amino acid residue of the sequence
  MISC_FEATURE (9)..(9): Xaa is glutamic acid, aspartic acid, or an amino acid residue which is covalently linked to another amino acid residue of the sequence
  MISC_FEATURE (16)..(16): Xaa is glycine, alanine, serine, or an amino acid residue which is covalently linked to another amino acid residue of the sequence
  MISC_FEATURE (17)..(17): Xaa is alanine, valine, glycine, serine, or an amino acid residue which is covalently linked to another amino acid residue of the sequence
  MISC_FEATURE (18)..(18): Xaa is isoleucine, leucine, valine, phenylalanine, methionine, or an amino acid residue which is covalently linked to another amino acid residue of the sequence
  MISC_FEATURE (19)..(19): Xaa is isoleucine, leucine, valine, phenylalanine, methionine, or an amino acid residue which is covalently linked to another amino acid residue of the sequence
  MISC_FEATURE (20)..(20): Xaa is glycine, alanine, serine, or an amino acid residue which is covalently linked to another amino acid residue of the sequence
HQKLXXXXXDVGSNKXXXXX

SEQ ID NO: 603 - protein, 19 aa, Artificial Sequence
  synthetic
  MISC_FEATURE (4)..(4): Xaa is valine, leucine, isoleucine, alanine, methionine, or an amino acid residue which is covalently linked to another amino acid residue of the sequence
  MISC_FEATURE (5)..(5): Xaa is phenylalanine, tyrosine, valine, leucine, isoleucine, methionine, or an amino acid residue which is covalently linked to another amino acid residue of the sequence
  MISC_FEATURE (6)..(6): Xaa is phenylalanine, tyrosine, valine, leucine, isoleucine, methionine, or an amino acid residue which is covalently linked to another amino acid residue of the sequence
  MISC_FEATURE (7)..(7): Xaa is alanine, valine, glycine, serine, or an amino acid residue which is covalently linked to another amino acid residue of the sequence
  MISC_FEATURE (8)..(8): Xaa is glutamic acid, aspartic acid, or an amino acid residue which is covalently linked to another amino acid residue of the sequence
  MISC_FEATURE (15)..(15): Xaa is glycine, alanine, serine, or an amino acid residue which is covalently linked to another amino acid residue of the sequence
  MISC_FEATURE (16)..(16): Xaa is alanine, valine, glycine, serine, or an amino acid residue which is covalently linked to another amino acid residue of the sequence
  MISC_FEATURE (17)..(17): Xaa is isoleucine, leucine, valine, phenylalanine, methionine, or an amino acid residue which is covalently linked to another amino acid residue of the sequence
  MISC_FEATURE (18)..(18): Xaa is isoleucine, leucine, valine, phenylalanine, methionine, or an amino acid residue which is covalently linked to another amino acid residue of the sequence
  MISC_FEATURE (19)..(19): Xaa is glycine, alanine, serine, or an amino acid residue which is covalently linked to another amino acid residue of the sequence
QKLXXXXXDVGSNKXXXXX

SEQ ID NO: 604 - protein, 18 aa, Artificial Sequence
  synthetic
  MISC_FEATURE (3)..(3): Xaa is valine, leucine, isoleucine, alanine, methionine, or an amino acid residue which is covalently linked to another amino acid residue of the sequence
  MISC_FEATURE (4)..(4): Xaa is phenylalanine, tyrosine, valine, leucine, isoleucine, methionine, or an amino acid residue which is covalently linked to another amino acid residue of the sequence
  MISC_FEATURE (5)..(5): Xaa is phenylalanine, tyrosine, valine, leucine, isoleucine, methionine, or an amino acid residue which is covalently linked to another amino acid residue of the sequence
  MISC_FEATURE (6)..(6): Xaa is alanine, valine, glycine, serine, or an amino acid residue which is covalently linked to another amino acid residue of the sequence
  MISC_FEATURE (7)..(7): Xaa is glutamic acid, aspartic acid, or an amino acid residue which is covalently linked to another amino acid residue of the sequence
  MISC_FEATURE (14)..(14): Xaa is glycine, alanine, serine, or an amino acid residue which is covalently linked to another amino acid residue of the sequence
  MISC_FEATURE (15)..(15): Xaa is alanine, valine, glycine, serine, or an amino acid residue which is covalently linked to another amino acid residue of the sequence
  MISC_FEATURE (16)..(16): Xaa is isoleucine, leucine, valine, phenylalanine, methionine, or an amino acid residue which is covalently linked to another amino acid residue of the sequence
  MISC_FEATURE (17)..(17): Xaa is isoleucine, leucine, valine, phenylalanine, methionine, or an amino acid residue which is covalently linked to another amino acid residue of the sequence
  MISC_FEATURE (18)..(18): Xaa is glycine, alanine, serine, or an amino acid residue which is covalently linked to another amino acid residue of the sequence
KLXXXXXDVGSNKXXXXX

SEQ ID NO: 605 - protein, 17 aa, Artificial Sequence
  synthetic
  MISC_FEATURE (2)..(2): Xaa is valine, leucine, isoleucine, alanine, methionine, or an amino acid residue which is covalently linked to another amino acid residue of the sequence
  MISC_FEATURE (3)..(3): Xaa is phenylalanine, tyrosine, valine, leucine, isoleucine, methionine, or an amino acid residue which is covalently linked to another amino acid residue of the sequence
  MISC_FEATURE (4)..(4): Xaa is phenylalanine, tyrosine, valine, leucine, isoleucine, methionine, or an amino acid residue which is covalently linked to another amino acid residue of the sequence
  MISC_FEATURE (5)..(5): Xaa is alanine, valine, glycine, serine, or an amino acid residue which is covalently linked to another amino acid residue of the sequence
  MISC_FEATURE (6)..(6): Xaa is glutamic acid, aspartic acid, or an amino acid residue which is covalently linked to another amino acid residue of the sequence
  MISC_FEATURE (13)..(13): Xaa is glycine, alanine, serine, or an amino acid residue which is covalently linked to another amino acid residue of the sequence
  MISC_FEATURE (14)..(14): Xaa is alanine, valine, glycine, serine, or an amino acid residue which is covalently linked to another amino acid residue of the sequence
  MISC_FEATURE (15)..(15): Xaa is isoleucine, leucine, valine, phenylalanine, methionine, or an amino acid residue which is covalently linked to another amino acid residue of the sequence
  MISC_FEATURE (16)..(16): Xaa is isoleucine, leucine, valine, phenylalanine, methionine, or an amino acid residue which is covalently linked to another amino acid residue of the sequence
  MISC_FEATURE (17)..(17): Xaa is glycine, alanine, serine, or an amino acid residue which is covalently linked to another amino acid residue of the sequence residue of the sequence
LXXXXXDVGSNKXXXXX

SEQ ID NO: 606 - protein, 16 aa, Artificial Sequence
  synthetic
  MISC_FEATURE (1)..(1): Xaa is valine, leucine, isoleucine, alanine, methionine, or an amino acid residue which is covalently linked to another amino acid residue of the sequence
  MISC_FEATURE (2)..(2): Xaa is phenylalanine, tyrosine, valine, leucine, isoleucine, methionine, or an amino acid residue which is covalently linked to another amino acid residue of the sequence
  MISC_FEATURE (3)..(3): Xaa is phenylalanine, tyrosine, valine, leucine, isoleucine, methionine, or an amino acid residue which is covalently linked to another amino acid residue of the sequence
  MISC_FEATURE (4)..(4): Xaa is alanine, valine, glycine, serine, or an amino acid residue which is covalently linked to another amino acid residue of the sequence
  MISC_FEATURE (5)..(5): Xaa is glutamic acid, aspartic acid, or an amino acid residue which is covalently linked to another amino acid residue of the sequence
  MISC_FEATURE (12)..(12): Xaa is glycine, alanine, serine, or an amino acid residue which is covalently linked to another amino acid residue of the sequence
  MISC_FEATURE (13)..(13): Xaa is alanine, valine, glycine, serine, or an amino acid residue which is covalently linked to another amino acid residue of the sequence
  MISC_FEATURE (14)..(14): Xaa is isoleucine, leucine, valine, phenylalanine, methionine, or an amino acid residue which is covalently linked to another amino acid residue of the sequence
  MISC_FEATURE (15)..(15): Xaa is isoleucine, leucine, valine, phenylalanine, methionine, or an amino acid residue which is covalently linked to another amino acid residue of the sequence
  MISC_FEATURE (16)..(16): Xaa is glycine, alanine, serine, or an amino acid residue which is covalently linked to another amino acid residue of the sequence
XXXXXDVGSNKXXXXX

SEQ ID NO: 607 - protein, 15 aa, Artificial Sequence
  synthetic
  MISC_FEATURE (1)..(1): Xaa is phenylalanine, tyrosine, valine, leucine, isoleucine, methionine, or an amino acid residue which is covalently linked to another amino acid residue of the sequence
  MISC_FEATURE (2)..(2): Xaa is phenylalanine, tyrosine, valine, leucine, isoleucine, methionine, or an amino acid residue which is covalently linked to another amino acid residue of the sequence
  MISC_FEATURE (3)..(3): Xaa is alanine, valine, glycine, serine, or an amino acid residue which is covalently linked to another amino acid residue of the sequence
  MISC_FEATURE (4)..(4): Xaa is glutamic acid, aspartic acid, or an amino acid residue which is covalently linked to another amino acid residue of the sequence
  MISC_FEATURE (11)..(11): Xaa is glycine, alanine, serine, or an amino acid residue which is covalently linked to another amino acid residue of the sequence
  MISC_FEATURE (12)..(12): Xaa is alanine, valine, glycine, serine, or an amino acid residue which is covalently linked to another amino acid residue of the sequence
  MISC_FEATURE (13)..(13): Xaa is isoleucine, leucine, valine, phenylalanine, methionine, or an amino acid residue which is covalently linked to another amino acid residue of the sequence
  MISC_FEATURE (14)..(14): Xaa is isoleucine, leucine, valine, phenylalanine, methionine, or an amino acid residue which is covalently linked to another amino acid residue of the sequence
XXXXDVGSNKXXXXG

SEQ ID NO: 608 - protein, 14 aa, Artificial Sequence
  synthetic
  MISC_FEATURE (1)..(1): Xaa is phenylalanine, tyrosine, valine, leucine, isoleucine, methionine, or an amino acid residue which is covalently linked to another amino acid residue of the sequence
  MISC_FEATURE (2)..(2): Xaa is alanine, valine, glycine, serine, or an amino acid residue which is covalently linked to another amino acid residue of the sequence
  MISC_FEATURE (3)..(3): Xaa is glutamic acid, aspartic acid, or an amino acid residue which is covalently linked to another amino acid residue of the sequence
  MISC_FEATURE (10)..(10): Xaa is glycine, alanine, serine, or an amino acid residue which is covalently linked to another amino acid residue of the sequence
  MISC_FEATURE (11)..(11): Xaa is alanine, valine, glycine, serine, or an amino acid residue which is covalently linked to another amino acid residue of the sequence
  MISC_FEATURE (12)..(12): Xaa is isoleucine, leucine, valine, phenylalanine, methionine, or an amino acid residue which is covalently linked to another amino acid residue of the sequence
XXXDVGSNKXXXIG

SEQ ID NO: 609 - protein, 13 aa, Artificial Sequence
  synthetic
  MISC_FEATURE (1)..(1): Xaa is alanine, valine, glycine, serine, or an amino acid residue which is covalently linked to another amino acid residue of the sequence
  MISC_FEATURE (2)..(2): Xaa is glutamic acid, aspartic acid, or an amino acid residue which is covalently linked to another amino acid residue of the sequence
  MISC_FEATURE (9)..(9): Xaa is glycine, alanine, serine, or an amino acid residue which is covalently linked to another amino acid residue of the sequence
  MISC_FEATURE (10)..(10): Xaa is alanine, valine, glycine, serine, or an amino acid residue which is covalently linked to another amino acid residue of the sequence
XXDVGSNKXXIIG

SEQ ID NO: 610 - protein, 12 aa, Artificial Sequence
  synthetic
  MISC_FEATURE (1)..(1): Xaa is glutamic acid, aspartic acid, or an amino acid residue which is covalently linked to another amino acid residue of the sequence
  MISC_FEATURE (8)..(8): Xaa is glycine, alanine, serine, or an amino acid residue which is covalently linked to another amino acid residue of the sequence
XDVGSNKXAIIG

SEQ ID NO: 611 - protein, 32 aa, Artificial Sequence
  synthetic
  MISC_FEATURE (19)..(19): Xaa is phenylalanine, tyrosine, valine, leucine, isoleucine, methionine, or an amino acid residue which is covalently linked to another amino acid residue of the sequence
  MISC_FEATURE (20)..(20): Xaa is phenylalanine, tyrosine, valine, leucine, isoleucine, methionine, or an amino acid residue which is covalently linked to another amino acid residue of the sequence
  MISC_FEATURE (21)..(21): Xaa is alanine, valine, glycine, serine, or an amino acid residue which is covalently linked to another amino acid residue of the sequence
  MISC_FEATURE (22)..(22): Xaa is glutamic acid, aspartic acid, or an amino acid residue which is covalently linked to another amino acid residue of the sequence
  MISC_FEATURE (29)..(29): Xaa is glycine, alanine, serine, or an amino acid residue which is covalently linked to another amino acid residue of the sequence
  MISC_FEATURE (30)..(30): Xaa is alanine, valine, glycine, serine, or an amino acid residue which is covalently linked to another amino acid residue of the sequence
  MISC_FEATURE (31)..(31): Xaa is isoleucine, leucine, valine, phenylalanine, methionine, or an amino acid residue which is covalently linked to another amino acid residue of the sequence
  MISC_FEATURE (32)..(32): Xaa is isoleucine, leucine, valine, phenylalanine, methionine, or an amino acid residue which is covalently linked to another amino acid residue of the sequence
DAEFRHDSGYEVHHQKLVXXXXDVGSNKXXXX

SEQ ID NO: 612 - protein, 31 aa, Artificial Sequence
  synthetic
  MISC_FEATURE (18)..(18): Xaa is phenylalanine, tyrosine, valine, leucine, isoleucine, methionine, or an amino acid residue which is covalently linked to another amino acid residue of the sequence
  MISC_FEATURE (19)..(19): Xaa is phenylalanine, tyrosine, valine, leucine, isoleucine, methionine, or an amino acid residue which is covalently linked to another amino acid residue of the sequence
  MISC_FEATURE (20)..(20): Xaa is alanine, valine, glycine, serine, or an amino acid residue which is covalently linked to another amino acid residue of the sequence
  MISC_FEATURE (21)..(21): Xaa is glutamic acid, aspartic acid, or an amino acid residue which is covalently linked to another amino acid residue of the sequence
  MISC_FEATURE (28)..(28): Xaa is glycine, alanine, serine, or an amino acid residue which is covalently linked to another amino acid residue of the sequence
  MISC_FEATURE (29)..(29): Xaa is alanine, valine, glycine, serine, or an amino acid residue which is covalently linked to another amino acid residue of the sequence
  MISC_FEATURE (30)..(30): Xaa is isoleucine, leucine, valine, phenylalanine, methionine, or an amino acid residue which is covalently linked to another amino acid residue of the sequence
  MISC_FEATURE (31)..(31): Xaa is isoleucine, leucine, valine, phenylalanine, methionine, or an amino acid residue which is covalently linked to another amino acid residue of the sequence
AEFRHDSGYEVHHQKLVXXXXDVGSNKXXXX

SEQ ID NO: 613 - protein, 30 aa, Artificial Sequence
  synthetic
  MISC_FEATURE (17)..(17): Xaa is phenylalanine, tyrosine, valine, leucine, isoleucine, methionine, or an amino acid residue which is covalently linked to another amino acid residue of the sequence
  MISC_FEATURE (18)..(18): Xaa is phenylalanine, tyrosine, valine, leucine, isoleucine, methionine, or an amino acid residue which is covalently linked to another amino acid residue of the sequence
  MISC_FEATURE (19)..(19): Xaa is alanine, valine, glycine, serine, or an amino acid residue which is covalently linked to another amino acid residue of the sequence
  MISC_FEATURE (20)..(20): Xaa is glutamic acid, aspartic acid, or an amino acid residue which is covalently linked to another amino acid residue of the sequence
  MISC_FEATURE (27)..(27): Xaa is glycine, alanine, serine, or an amino acid residue which is covalently linked to another amino acid residue of the sequence
  MISC_FEATURE (28)..(28): Xaa is alanine, valine, glycine, serine, or an amino acid residue which is covalently linked to another amino acid residue of the sequence
  MISC_FEATURE (29)..(29): Xaa is isoleucine, leucine, valine, phenylalanine, methionine, or an amino acid residue which is covalently linked to another amino acid residue of the sequence
  MISC_FEATURE (30)..(30): Xaa is isoleucine, leucine, valine, phenylalanine, methionine, or an amino acid residue which is covalently linked to another amino acid residue of the sequence
EFRHDSGYEVHHQKLVXXXXDVGSNKXXXX

SEQ ID NO: 614 - protein, 29 aa, Artificial Sequence
  synthetic
  MISC_FEATURE (16)..(16): Xaa is phenylalanine, tyrosine, valine, leucine, isoleucine, methionine, or an amino acid residue which is covalently linked to another amino acid residue of the sequence
  MISC_FEATURE (17)..(17): Xaa is phenylalanine, tyrosine, valine, leucine, isoleucine, methionine, or an amino acid residue which is covalently linked to another amino acid residue of the sequence
  MISC_FEATURE (18)..(18): Xaa is alanine, valine, glycine, serine, or an amino acid residue which is covalently linked to another amino acid residue of the sequence
  MISC_FEATURE (19)..(19): Xaa is glutamic acid, aspartic acid, or an amino acid residue which is covalently linked to another amino acid residue of the sequence
  MISC_FEATURE (26)..(26): Xaa is glycine, alanine, serine, or an amino acid residue which is covalently linked to another amino acid residue of the sequence
  MISC_FEATURE (27)..(27): Xaa is alanine, valine, glycine, serine, or an amino acid residue which is covalently linked to another amino acid residue of the sequence
  MISC_FEATURE (28)..(28): Xaa is isoleucine, leucine, valine, phenylalanine, methionine, or an amino acid residue which is covalently linked to another amino acid residue of the sequence
  MISC_FEATURE (29)..(29): Xaa is isoleucine, leucine, valine, phenylalanine, methionine, or an amino acid residue which is covalently linked to another amino acid residue of the sequence
FRHDSGYEVHHQKLVXXXXDVGSNKXXXX

SEQ ID NO: 615 - protein, 28 aa, Artificial Sequence
  synthetic
  MISC_FEATURE (15)..(15): Xaa is phenylalanine, tyrosine, valine, leucine, isoleucine, methionine, or an amino acid residue which is covalently linked to another amino acid residue of the sequence
  MISC_FEATURE (16)..(16): Xaa is phenylalanine, tyrosine, valine, leucine, isoleucine, methionine, or an amino acid residue which is covalently linked to another amino acid residue of the sequence
  MISC_FEATURE (17)..(17): Xaa is alanine, valine, glycine, serine, or an amino acid residue which is covalently linked to another amino acid residue of the sequence
  MISC_FEATURE (18)..(18): Xaa is glutamic acid, aspartic acid, or an amino acid residue which is covalently linked to another amino acid residue of the sequence
  MISC_FEATURE (25)..(25): Xaa is glycine, alanine, serine, or an amino acid residue which is covalently linked to another amino acid residue of the sequence
  MISC_FEATURE (26)..(26): Xaa is alanine, valine, glycine, serine, or an amino acid residue which is covalently linked to another amino acid residue of the sequence
  MISC_FEATURE (27)..(27): Xaa is isoleucine, leucine, valine, phenylalanine, methionine, or an amino acid residue which is covalently linked to another amino acid residue of the sequence
  MISC_FEATURE (28)..(28): Xaa is isoleucine, leucine, valine, phenylalanine, methionine, or an amino acid residue which is covalently linked to another amino acid residue of the sequence
RHDSGYEVHHQKLVXXXXDVGSNKXXXX

SEQ ID NO: 616 - protein, 27 aa, Artificial Sequence
  synthetic
  MISC_FEATURE (14)..(14): Xaa is phenylalanine, tyrosine, valine, leucine, isoleucine, methionine, or an amino acid residue which is covalently linked to another amino acid residue of the sequence
  MISC_FEATURE (15)..(15): Xaa is phenylalanine, tyrosine, valine, leucine, isoleucine, methionine, or an amino acid residue which is covalently linked to another amino acid residue of the sequence
  MISC_FEATURE (16)..(16): Xaa is alanine, valine, glycine, serine, or an amino acid residue which is covalently linked to another amino acid residue of the sequence
  MISC_FEATURE (17)..(17): Xaa is glutamic acid, aspartic acid, or an amino acid residue which is covalently linked to another amino acid residue of the sequence
  MISC_FEATURE (24)..(24): Xaa is glycine, alanine, serine, or an amino acid residue which is covalently linked to another amino acid residue of the sequence
  MISC_FEATURE (25)..(25): Xaa is alanine, valine, glycine, serine, or an amino acid residue which is covalently linked to another amino acid residue of the sequence
  MISC_FEATURE (26)..(26): Xaa is isoleucine, leucine, valine, phenylalanine, methionine, or an amino acid residue which is covalently linked to another amino acid residue of the sequence
  MISC_FEATURE (27)..(27): Xaa is isoleucine, leucine, valine, phenylalanine, methionine, or an amino acid residue which is covalently linked to another amino acid residue of the sequence
HDSGYEVHHQKLVXXXXDVGSNKXXXX

SEQ ID NO: 617 - protein, 26 aa, Artificial Sequence
  synthetic
  MISC_FEATURE (13)..(13): Xaa is phenylalanine, tyrosine, valine, leucine, isoleucine, methionine, or an amino acid residue which is covalently linked to another amino acid residue of the sequence
  MISC_FEATURE (14)..(14): Xaa is phenylalanine, tyrosine, valine, leucine, isoleucine, methionine, or an amino acid residue which is covalently linked to another amino acid residue of the sequence
  MISC_FEATURE (15)..(15): Xaa is alanine, valine, glycine, serine, or an amino acid residue which is covalently linked to another amino acid residue of the sequence
  MISC_FEATURE (16)..(16): Xaa is glutamic acid, aspartic acid, or an amino acid residue which is covalently linked to another amino acid residue of the sequence
  MISC_FEATURE (23)..(23): Xaa is glycine, alanine, serine, or an amino acid residue which is covalently linked to another amino acid residue of the sequence
  MISC_FEATURE (24)..(24): Xaa is alanine, valine, glycine, serine, or an amino acid residue which is covalently linked to another amino acid residue of the sequence
  MISC_FEATURE (25)..(25): Xaa is isoleucine, leucine, valine, phenylalanine, methionine, or an amino acid residue which is covalently linked to another amino acid residue of the sequence
  MISC_FEATURE (26)..(26): Xaa is isoleucine, leucine, valine, phenylalanine, methionine, or an amino acid residue which is covalently linked to another amino acid residue of the sequence
DSGYEVHHQKLVXXXXDVGSNKXXXX

SEQ ID NO: 618 - protein, 25 aa, Artificial Sequence
  synthetic
  MISC_FEATURE (12)..(12): Xaa is phenylalanine, tyrosine, valine, leucine, isoleucine, methionine, or an amino acid residue which is covalently linked to another amino acid residue of the sequence
  MISC_FEATURE (13)..(13): Xaa is phenylalanine, tyrosine, valine, leucine, isoleucine, methionine, or an amino acid residue which is covalently linked to another amino acid residue of the sequence
  MISC_FEATURE (14)..(14): Xaa is alanine, valine, glycine, serine, or an amino acid residue which is covalently linked to another amino acid residue of the sequence
  MISC_FEATURE (15)..(15): Xaa is glutamic acid, aspartic acid, or an amino acid residue which is covalently linked to another amino acid residue of the sequence
  MISC_FEATURE (22)..(22): Xaa is glycine, alanine, serine, or an amino acid residue which is covalently linked to another amino acid residue of the sequence
  MISC_FEATURE (23)..(23): Xaa is alanine, valine, glycine, serine, or an amino acid residue which is covalently linked to another amino acid residue of the sequence
  MISC_FEATURE (24)..(24): Xaa is isoleucine, leucine, valine, phenylalanine, methionine, or an amino acid residue which is covalently linked to another amino acid residue of the sequence
  MISC_FEATURE (25)..(25): Xaa is isoleucine, leucine, valine, phenylalanine, methionine, or an amino acid residue which is covalently linked to another amino acid residue of the sequence
SGYEVHHQKLVXXXXDVGSNKXXXX

SEQ ID NO: 619 - protein, 24 aa, Artificial Sequence
  synthetic
  MISC_FEATURE (11)..(11): Xaa is phenylalanine, tyrosine, valine, leucine, isoleucine, methionine, or an amino acid residue which is covalently linked to another amino acid residue of the sequence
  MISC_FEATURE (12)..(12): Xaa is phenylalanine, tyrosine, valine, leucine, isoleucine, methionine, or an amino acid residue which is covalently linked to another amino acid residue of the sequence
  MISC_FEATURE (13)..(13): Xaa is alanine, valine, glycine, serine, or an amino acid residue which is covalently linked to another amino acid residue of the sequence
  MISC_FEATURE (14)..(14): Xaa is glutamic acid, aspartic acid, or an amino acid residue which is covalently linked to another amino acid residue of the sequence
  MISC_FEATURE (21)..(21): Xaa is glycine, alanine, serine, or an amino acid residue which is covalently linked to another amino acid residue of the sequence
  MISC_FEATURE (22)..(22): Xaa is alanine, valine, glycine, serine, or an amino acid residue which is covalently linked to another amino acid residue of the sequence
  MISC_FEATURE (23)..(23): Xaa is isoleucine, leucine, valine, phenylalanine, methionine, or an amino acid residue which is covalently linked to another amino acid residue of the sequence
  MISC_FEATURE (24)..(24): Xaa is isoleucine, leucine, valine, phenylalanine, methionine, or an amino acid residue which is covalently linked to another amino acid residue of the sequence
GYEVHHQKLVXXXXDVGSNKXXXX

SEQ ID NO: 620 - protein, 23 aa, Artificial Sequence
  synthetic
  MISC_FEATURE (10)..(10): Xaa is phenylalanine, tyrosine, valine, leucine, isoleucine, methionine, or an amino acid residue which is covalently linked to another amino acid residue of the sequence
  MISC_FEATURE (11)..(11): Xaa is phenylalanine, tyrosine, valine, leucine, isoleucine, methionine, or an amino acid residue which is covalently linked to another amino acid residue of the sequence
  MISC_FEATURE (12)..(12): Xaa is alanine, valine, glycine, serine, or an amino acid residue which is covalently linked to another amino acid residue of the sequence
  MISC_FEATURE (13)..(13): Xaa is glutamic acid, aspartic acid, or an amino acid residue which is covalently linked to another amino acid residue of the sequence
  MISC_FEATURE (20)..(20): Xaa is glycine, alanine, serine, or an amino acid residue which is covalently linked to another amino acid residue of the sequence
  MISC_FEATURE (21)..(21): Xaa is alanine, valine, glycine, serine, or an amino acid residue which is covalently linked to another amino acid residue of the sequence
  MISC_FEATURE (22)..(22): Xaa is isoleucine, leucine, valine, phenylalanine, methionine, or an amino acid residue which is covalently linked to another amino acid residue of the sequence
  MISC_FEATURE (23)..(23): Xaa is isoleucine, leucine, valine, phenylalanine, methionine, or an amino acid residue which is covalently linked to another amino acid residue of the sequence
YEVHHQKLVXXXXDVGSNKXXXX

SEQ ID NO: 621 - protein, 22 aa, Artificial Sequence
  synthetic
  MISC_FEATURE (9)..(9): Xaa is phenylalanine, tyrosine, valine, leucine, isoleucine, methionine, or an amino acid residue which is covalently linked to another amino acid residue of the sequence
  MISC_FEATURE (10)..(10): Xaa is phenylalanine, tyrosine, valine, leucine, isoleucine, methionine, or an amino acid residue which is covalently linked to another amino acid residue of the sequence
  MISC_FEATURE (11)..(11): Xaa is alanine, valine, glycine, serine, or an amino acid residue which is covalently linked to another amino acid residue of the sequence
  MISC_FEATURE (12)..(12): Xaa is glutamic acid, aspartic acid, or an amino acid residue which is covalently linked to another amino acid residue of the sequence
  MISC_FEATURE (19)..(19): Xaa is glycine, alanine, serine, or an amino acid residue which is covalently linked to another amino acid residue of the sequence
  MISC_FEATURE (20)..(20): Xaa is alanine, valine, glycine, serine, or an amino acid residue which is covalently linked to another amino acid residue of the sequence
  MISC_FEATURE (21)..(21): Xaa is isoleucine, leucine, valine, phenylalanine, methionine, or an amino acid residue which is covalently linked to another amino acid residue of the sequence
  MISC_FEATURE (22)..(22): Xaa is isoleucine, leucine, valine, phenylalanine, methionine, or an amino acid residue which is covalently linked to another amino acid residue of the sequence
EVHHQKLVXXXXDVGSNKXXXX

SEQ ID NO: 622 - protein, 21 aa, Artificial Sequence
  synthetic
  MISC_FEATURE (8)..(8): Xaa is phenylalanine, tyrosine, valine, leucine, isoleucine, methionine, or an amino acid residue which is covalently linked to another amino acid residue of the sequence
  MISC_FEATURE (9)..(9): Xaa is phenylalanine, tyrosine, valine, leucine, isoleucine, methionine, or an amino acid residue which is covalently linked to another amino acid residue of the sequence
  MISC_FEATURE (10)..(10): Xaa is alanine, valine, glycine, serine, or an amino acid residue which is covalently linked to another amino acid residue of the sequence
  MISC_FEATURE (11)..(11): Xaa is glutamic acid, aspartic acid, or an amino acid residue which is covalently linked to another amino acid residue of the sequence
  MISC_FEATURE (18)..(18): Xaa is glycine, alanine, serine, or an amino acid residue which is covalently linked to another amino acid residue of the sequence
  MISC_FEATURE (19)..(19): Xaa is alanine, valine, glycine, serine, or an amino acid residue which is covalently linked to another amino acid residue of the sequence
  MISC_FEATURE (20)..(20): Xaa is isoleucine, leucine, valine, phenylalanine, methionine, or an amino acid residue which is covalently linked to another amino acid residue of the sequence
  MISC_FEATURE (21)..(21): Xaa is isoleucine, leucine, valine, phenylalanine, methionine, or an amino acid residue which is covalently linked to another amino acid residue of the sequence
VHHQKLVXXXXDVGSNKXXXX

SEQ ID NO: 623 - protein, 20 aa, Artificial Sequence
  synthetic
  MISC_FEATURE (7)..(7): Xaa is phenylalanine, tyrosine, valine, leucine, isoleucine, methionine, or an amino acid residue which is covalently linked to another amino acid residue of the sequence
  MISC_FEATURE (8)..(8): Xaa is phenylalanine, tyrosine, valine, leucine, isoleucine, methionine, or an amino acid residue which is covalently linked to another amino acid residue of the sequence
  MISC_FEATURE (9)..(9): Xaa is alanine, valine, glycine, serine, or an amino acid residue which is covalently linked to another amino acid residue of the sequence
  MISC_FEATURE (10)..(10): Xaa is glutamic acid, aspartic acid, or an amino acid residue which is covalently linked to another amino acid residue of the sequence
  MISC_FEATURE (17)..(17): Xaa is glycine, alanine, serine, or an amino acid residue which is covalently linked to another amino acid residue of the sequence
  MISC_FEATURE (18)..(18): Xaa is alanine, valine, glycine, serine, or an amino acid residue which is covalently linked to another amino acid residue of the sequence
  MISC_FEATURE (19)..(19): Xaa is isoleucine, leucine, valine, phenylalanine, methionine, or an amino acid residue which is covalently linked to another amino acid residue of the sequence
  MISC_FEATURE (20)..(20): Xaa is isoleucine, leucine, valine, phenylalanine, methionine, or an amino acid residue which is covalently linked to another amino acid residue of the sequence
HHQKLVXXXXDVGSNKXXXX

SEQ ID NO: 624 - protein, 19 aa, Artificial Sequence
  synthetic
  MISC_FEATURE (6)..(6): Xaa is phenylalanine, tyrosine, valine, leucine, isoleucine, methionine, or an amino acid residue which is covalently linked to another amino acid residue of the sequence
  MISC_FEATURE (7)..(7): Xaa is phenylalanine, tyrosine, valine, leucine, isoleucine, methionine, or an amino acid residue which is covalently linked to another amino acid residue of the sequence
  MISC_FEATURE (8)..(8): Xaa is alanine, valine, glycine, serine, or an amino acid residue which is covalently linked to another amino acid residue of the sequence
  MISC_FEATURE (9)..(9): Xaa is glutamic acid, aspartic acid, or an amino acid residue which is covalently linked to another amino acid residue of the sequence
  MISC_FEATURE (16)..(16): Xaa is glycine, alanine, serine, or an amino acid residue which is covalently linked to another amino acid residue of the sequence
  MISC_FEATURE (17)..(17): Xaa is alanine, valine, glycine, serine, or an amino acid residue which is covalently linked to another amino acid residue of the sequence
  MISC_FEATURE (18)..(18): Xaa is isoleucine, leucine, valine, phenylalanine, methionine, or an amino acid residue which is covalently linked to another amino acid residue of the sequence
  MISC_FEATURE (19)..(19): Xaa is isoleucine, leucine, valine, phenylalanine, methionine, or an amino acid residue which is covalently linked to another amino acid residue of the sequence
HQKLVXXXXDVGSNKXXXX

SEQ ID NO: 625 - protein, 18 aa, Artificial Sequence
  synthetic
  MISC_FEATURE (5)..(5): Xaa is phenylalanine, tyrosine, valine, leucine, isoleucine, methionine, or an amino acid residue which is covalently linked to another amino acid residue of the sequence
  MISC_FEATURE (6)..(6): Xaa is phenylalanine, tyrosine, valine, leucine, isoleucine, methionine, or an amino acid residue which is covalently linked to another amino acid residue of the sequence
  MISC_FEATURE (7)..(7): Xaa is alanine, valine, glycine, serine, or an amino acid residue which is covalently linked to another amino acid residue of the sequence
  MISC_FEATURE (8)..(8): Xaa is glutamic acid, aspartic acid, or an amino acid residue which is covalently linked to another amino acid residue of the sequence
  MISC_FEATURE (15)..(15): Xaa is glycine, alanine, serine, or an amino acid residue which is covalently linked to another amino acid residue of the sequence
  MISC_FEATURE (16)..(16): Xaa is alanine, valine, glycine, serine, or an amino acid residue which is covalently linked to another amino acid residue of the sequence
  MISC_FEATURE (17)..(17): Xaa is isoleucine, leucine, valine, phenylalanine, methionine, or an amino acid residue which is covalently linked to another amino acid residue of the sequence
  MISC_FEATURE (18)..(18): Xaa is isoleucine, leucine, valine, phenylalanine, methionine, or an amino acid residue which is covalently linked to another amino acid residue of the sequence
QKLVXXXXDVGSNKXXXX

SEQ ID NO: 626 - protein, 17 aa, Artificial Sequence
  synthetic
  MISC_FEATURE (4)..(4): Xaa is phenylalanine, tyrosine, valine, leucine, isoleucine, methionine, or an amino acid residue which is covalently linked to another amino acid residue of the sequence
  MISC_FEATURE (5)..(5): Xaa is phenylalanine, tyrosine, valine, leucine, isoleucine, methionine, or an amino acid residue which is covalently linked to another amino acid residue of the sequence
  MISC_FEATURE (6)..(6): Xaa is alanine, valine, glycine, serine, or an amino acid residue which is covalently linked to another amino acid residue of the sequence
  MISC_FEATURE (7)..(7): Xaa is glutamic acid, aspartic acid, or an amino acid residue which is covalently linked to another amino acid residue of the sequence
  MISC_FEATURE (14)..(14): Xaa is glycine, alanine, serine, or an amino acid residue which is covalently linked to another amino acid residue of the sequence
  MISC_FEATURE (15)..(15): Xaa is alanine, valine, glycine, serine, or an amino acid residue which is covalently linked to another amino acid residue of the sequence
  MISC_FEATURE (16)..(16): Xaa is isoleucine, leucine, valine, phenylalanine, methionine, or an amino acid residue which is covalently linked to another amino acid residue of the sequence
  MISC_FEATURE (17)..(17): Xaa is isoleucine, leucine, valine, phenylalanine, methionine, or an amino acid residue which is covalently linked to another amino acid residue of the sequence
KLVXXXXDVGSNKXXXX

SEQ ID NO: 627 - protein, 16 aa, Artificial Sequence
  synthetic
  MISC_FEATURE (3)..(3): Xaa is phenylalanine, tyrosine, valine, leucine, isoleucine, methionine, or an amino acid residue which is covalently linked to another amino acid residue of the sequence
  MISC_FEATURE (4)..(4): Xaa is phenylalanine, tyrosine, valine, leucine, isoleucine, methionine, or an amino acid residue which is covalently linked to another amino acid residue of the sequence
  MISC_FEATURE (5)..(5): Xaa is alanine, valine, glycine, serine, or an amino acid residue which is covalently linked to another amino acid residue of the sequence
  MISC_FEATURE (6)..(6): Xaa is glutamic acid, aspartic acid, or an amino acid residue which is covalently linked to another amino acid residue of the sequence
  MISC_FEATURE (13)..(13): Xaa is glycine, alanine, serine, or an amino acid residue which is covalently linked to another amino acid residue of the sequence
  MISC_FEATURE (14)..(14): Xaa is alanine, valine, glycine, serine, or an amino acid residue which is covalently linked to another amino acid residue of the sequence
  MISC_FEATURE (15)..(15): Xaa is isoleucine, leucine, valine, phenylalanine, methionine, or an amino acid residue which is covalently linked to another amino acid residue of the sequence
  MISC_FEATURE (16)..(16): Xaa is isoleucine, leucine, valine, phenylalanine, methionine, or an amino acid residue which is covalently linked to another amino acid residue of the sequence
LVXXXXDVGSNKXXXX

SEQ ID NO: 628 - protein, 15 aa, Artificial Sequence
  synthetic
  MISC_FEATURE (2)..(2): Xaa is phenylalanine, tyrosine, valine, leucine, isoleucine, methionine, or an amino acid residue which is covalently linked to another amino acid residue of the sequence
  MISC_FEATURE (3)..(3): Xaa is phenylalanine, tyrosine, valine, leucine, isoleucine, methionine, or an amino acid residue which is covalently linked to another amino acid residue of the sequence
  MISC_FEATURE (4)..(4): Xaa is alanine, valine, glycine, serine, or an amino acid residue which is covalently linked to another amino acid residue of the sequence
  MISC_FEATURE (5)..(5): Xaa is glutamic acid, aspartic acid, or an amino acid residue which is covalently linked to another amino acid residue of the sequence
  MISC_FEATURE (12)..(12): Xaa is glycine, alanine, serine, or an amino acid residue which is covalently linked to another amino acid residue of the sequence
  MISC_FEATURE (13)..(13): Xaa is alanine, valine, glycine, serine, or an amino acid residue which is covalently linked to another amino acid residue of the sequence
  MISC_FEATURE (14)..(14): Xaa is isoleucine, leucine, valine, phenylalanine, methionine, or an amino acid residue which is covalently linked to another amino acid residue of the sequence
  MISC_FEATURE (15)..(15): Xaa is isoleucine, leucine, valine, phenylalanine, methionine, or an amino acid residue which is covalently linked to another amino acid residue of the sequence
VXXXXDVGSNKXXXX

SEQ ID NO: 629 - protein, 14 aa, Artificial Sequence
  synthetic
  MISC_FEATURE (1)..(1): Xaa is phenylalanine, tyrosine, valine, leucine, isoleucine, methionine, or an amino acid residue which is covalently linked to another amino acid residue of the sequence
  MISC_FEATURE (2)..(2): Xaa is phenylalanine, tyrosine, valine, leucine, isoleucine, methionine, or an amino acid residue which is covalently linked to another amino acid residue of the sequence
  MISC_FEATURE (3)..(3): Xaa is alanine, valine, glycine, serine, or an amino acid residue which is covalently linked to another amino acid residue of the sequence
  MISC_FEATURE (4)..(4): Xaa is glutamic acid, aspartic acid, or an amino acid residue which is covalently linked to another amino acid residue of the sequence
  MISC_FEATURE (11)..(11): Xaa is glycine, alanine, serine, or an amino acid residue which is covalently linked to another amino acid residue of the sequence
  MISC_FEATURE (12)..(12): Xaa is alanine, valine, glycine, serine, or an amino acid residue which is covalently linked to another amino acid residue of the sequence
  MISC_FEATURE (13)..(13): Xaa is isoleucine, leucine, valine, phenylalanine, methionine, or an amino acid residue which is covalently linked to another amino acid residue of the sequence
  MISC_FEATURE (14)..(14): Xaa is isoleucine, leucine, valine, phenylalanine, methionine, or an amino acid residue which is covalently linked to another amino acid residue of the sequence
XXXXDVGSNKXXXX

SEQ ID NO: 630 - protein, 13 aa, Artificial Sequence
  synthetic
  MISC_FEATURE (1)..(1): Xaa is phenylalanine, tyrosine, valine, leucine, isoleucine, methionine, or an amino acid residue which is covalently linked to another amino acid residue of the sequence
  MISC_FEATURE (2)..(2): Xaa is alanine, valine, glycine, serine, or an amino acid residue which is covalently linked to another amino acid residue of the sequence
  MISC_FEATURE (3)..(3): Xaa is glutamic acid, aspartic acid, or an amino acid residue which is covalently linked to another amino acid residue of the sequence
  MISC_FEATURE (10)..(10): Xaa is glycine, alanine, serine, or an amino acid residue which is covalently linked to another amino acid residue of the sequence
  MISC_FEATURE (11)..(11): Xaa is alanine, valine, glycine, serine, or an amino acid residue which is covalently linked to another amino acid residue of the sequence
  MISC_FEATURE (12)..(12): Xaa is isoleucine, leucine, valine, phenylalanine, methionine, or an amino acid residue which is covalently linked to another amino acid residue of the sequence
XXXDVGSNKXXXI

SEQ ID NO: 631 - protein, 12 aa, Artificial Sequence
  synthetic
  MISC_FEATURE (1)..(1): Xaa is alanine, valine, glycine, serine, or an amino acid residue which is covalently linked to another amino acid residue of the sequence
  MISC_FEATURE (2)..(2): Xaa is glutamic acid, aspartic acid, or an amino acid residue which is covalently linked to another amino acid residue of the sequence
  MISC_FEATURE (9)..(9): Xaa is glycine, alanine, serine, or an amino acid residue which is covalently linked to another amino acid residue of the sequence
  MISC_FEATURE (10)..(10): Xaa is alanine, valine, glycine, serine, or an amino acid residue which is covalently linked to another amino acid residue of the sequence
XXDVGSNKXXII

SEQ ID NO: 632 - protein, 11 aa, Artificial Sequence
  synthetic
  MISC_FEATURE (1)..(1): Xaa is glutamic acid, aspartic acid, or an amino acid residue which is covalently linked to another amino acid residue of the sequence
  MISC_FEATURE (8)..(8): Xaa is glycine, alanine, serine, or an amino acid residue which is covalently linked to another amino acid residue of the sequence
XDVGSNKXAII

SEQ ID NO: 633 - protein, 31 aa, Artificial Sequence
  synthetic
  MISC_FEATURE (20)..(20): Xaa is phenylalanine, tyrosine, valine, leucine, isoleucine, methionine, or an amino acid residue which is covalently linked to another amino acid residue of the sequence
  MISC_FEATURE (21)..(21): Xaa is alanine, valine, glycine, serine, or an amino acid residue which is covalently linked to another amino acid residue of the sequence
  MISC_FEATURE (22)..(22): Xaa is glutamic acid, aspartic acid, or an amino acid residue which is covalently linked to another amino acid residue of the sequence
  MISC_FEATURE (29)..(29): Xaa is glycine, alanine, serine, or an amino acid residue which is covalently linked to another amino acid residue of the sequence
  MISC_FEATURE (30)..(30): Xaa is alanine, valine, glycine, serine, or an amino acid residue which is covalently linked to another amino acid residue of the sequence
  MISC_FEATURE (31)..(31): Xaa is isoleucine, leucine, valine, phenylalanine, methionine, or an amino acid residue which is covalently linked to another amino acid residue of the sequence
DAEFRHDSGYEVHHQKLVFXXXDVGSNKXXX

SEQ ID NO: 634 - protein, 30 aa, Artificial Sequence
  synthetic
  MISC_FEATURE (19)..(19): Xaa is phenylalanine, tyrosine, valine, leucine, isoleucine, methionine, or an amino acid residue which is covalently linked to another amino acid residue of the sequence
  MISC_FEATURE (20)..(20): Xaa is alanine, valine, glycine, serine, or an amino acid residue which is covalently linked to another amino acid residue of the sequence
  MISC_FEATURE (21)..(21): Xaa is glutamic acid, aspartic acid, or an amino acid residue which is covalently linked to another amino acid residue of the sequence
  MISC_FEATURE (28)..(28): Xaa is glycine, alanine, serine, or an amino acid residue which is covalently linked to another amino acid residue of the sequence
  MISC_FEATURE (29)..(29): Xaa is alanine, valine, glycine, serine, or an amino acid residue which is covalently linked to another amino acid residue of the sequence
  MISC_FEATURE (30)..(30): Xaa is isoleucine, leucine, valine, phenylalanine, methionine, or an amino acid residue which is covalently linked to another amino acid residue of the sequence
AEFRHDSGYEVHHQKLVFXXXDVGSNKXXX

SEQ ID NO: 635 - protein, 29 aa, Artificial Sequence
  synthetic
  MISC_FEATURE (18)..(18): Xaa is phenylalanine, tyrosine, valine, leucine, isoleucine, methionine, or an amino acid residue which is covalently linked to another amino acid residue of the sequence
  MISC_FEATURE (19)..(19): Xaa is alanine, valine, glycine, serine, or an amino acid residue which is covalently linked to another amino acid residue of the sequence
  MISC_FEATURE (20)..(20): Xaa is glutamic acid, aspartic acid, or an amino acid residue which is covalently linked to another amino acid residue of the sequence
  MISC_FEATURE (27)..(27): Xaa is glycine, alanine, serine, or an amino acid residue which is covalently linked to another amino acid residue of the sequence
  MISC_FEATURE (28)..(28): Xaa is alanine, valine, glycine, serine, or an amino acid residue which is covalently linked to another amino acid residue of the sequence
  MISC_FEATURE (29)..(29): Xaa is isoleucine, leucine, valine, phenylalanine, methionine, or an amino acid residue which is covalently linked to another amino acid residue of the sequence
EFRHDSGYEVHHQKLVFXXXDVGSNKXXX

SEQ ID NO: 636 - protein, 28 aa, Artificial Sequence
  synthetic
  MISC_FEATURE (17)..(17): Xaa is phenylalanine, tyrosine, valine, leucine, isoleucine, methionine, or an amino acid residue which is covalently linked to another amino acid residue of the sequence
  MISC_FEATURE (18)..(18): Xaa is alanine, valine, glycine, serine, or an amino acid residue which is covalently linked to another amino acid residue of the sequence
  MISC_FEATURE (19)..(19): Xaa is glutamic acid, aspartic acid, or an amino acid residue which is covalently linked to another amino acid residue of the sequence
  MISC_FEATURE (26)..(26): Xaa is glycine, alanine, serine, or an amino acid residue which is covalently linked to another amino acid residue of the sequence
  MISC_FEATURE (27)..(27): Xaa is alanine, valine, glycine, serine, or an amino acid residue which is covalently linked to another amino acid residue of the sequence
  MISC_FEATURE (28)..(28): Xaa is isoleucine, leucine, valine, phenylalanine, methionine, or an amino acid residue which is covalently linked to another amino acid residue of the sequence
FRHDSGYEVHHQKLVFXXXDVGSNKXXX

SEQ ID NO: 637 - protein, 27 aa, Artificial Sequence
  synthetic
  MISC_FEATURE (16)..(16): Xaa is phenylalanine, tyrosine, valine, leucine, isoleucine, methionine, or an amino acid residue which is covalently linked to another amino acid residue of the sequence
  MISC_FEATURE (17)..(17): Xaa is alanine, valine, glycine, serine, or an amino acid residue which is covalently linked to another amino acid residue of the sequence
  MISC_FEATURE (18)..(18): Xaa is glutamic acid, aspartic acid, or an amino acid residue which is covalently linked to another amino acid residue of the sequence
  MISC_FEATURE (26)..(25): Xaa is glycine, alanine, serine, or an amino acid residue which is covalently linked to another amino acid residue of the sequence
  MISC_FEATURE (26)..(26): Xaa is alanine, valine, glycine, serine, or an amino acid residue which is covalently linked to another amino acid residue of the sequence
  MISC_FEATURE (27)..(27): Xaa is isoleucine, leucine, valine, phenylalanine, methionine, or an amino acid residue which is covalently linked to another amino acid residue of the sequence
RHDSGYEVHHQKLVFXXXDVGSNKXXX

SEQ ID NO: 638 - protein, 26 aa, Artificial Sequence
  synthetic
  MISC_FEATURE (15)..(15): Xaa is phenylalanine, tyrosine, valine, leucine, isoleucine, methionine, or an amino acid residue which is covalently linked to another amino acid residue of the sequence
  MISC_FEATURE (16)..(16): Xaa is alanine, valine, glycine, serine, or an amino acid residue which is covalently linked to another amino acid residue of the sequence
  MISC_FEATURE (17)..(17): Xaa is glutamic acid, aspartic acid, or an amino acid residue which is covalently linked to another amino acid residue of the sequence
  MISC_FEATURE (24)..(24): Xaa is glycine, alanine, serine, or an amino acid residue which is covalently linked to another amino acid residue of the sequence
  MISC_FEATURE (25)..(25): Xaa is alanine, valine, glycine, serine, or an amino acid residue which is covalently linked to another amino acid residue of the sequence
  MISC_FEATURE (26)..(26): Xaa is isoleucine, leucine, valine, phenylalanine, methionine, or an amino acid residue which is covalently linked to another amino acid residue of the sequence
HDSGYEVHHQKLVFXXXDVGSNKXXX

SEQ ID NO: 639 - protein, 25 aa, Artificial Sequence
  synthetic
  MISC_FEATURE (14)..(14): Xaa is phenylalanine, tyrosine, valine, leucine, isoleucine, methionine, or an amino acid residue which is covalently linked to another amino acid residue of the sequence
  MISC_FEATURE (15)..(15): Xaa is alanine, valine, glycine, serine, or an amino acid residue which is covalently linked to another amino acid residue of the sequence
  MISC_FEATURE (16)..(16): Xaa is glutamic acid, aspartic acid, or an amino acid residue which is covalently linked to another amino acid residue of the sequence
  MISC_FEATURE (23)..(23): Xaa is glycine, alanine, serine, or an amino acid residue which is covalently linked to another amino acid residue of the sequence
  MISC_FEATURE (24)..(24): Xaa is alanine, valine, glycine, serine, or an amino acid residue which is covalently linked to another amino acid residue of the sequence
  MISC_FEATURE (25)..(25): Xaa is isoleucine, leucine, valine, phenylalanine, methionine, or an amino acid residue which is covalently linked to another amino acid residue of the sequence
DSGYEVHHQKLVFXXXDVGSNKXXX

SEQ ID NO: 640 - protein, 24 aa, Artificial Sequence
  synthetic
  MISC_FEATURE (13)..(13): Xaa is phenylalanine, tyrosine, valine, leucine, isoleucine, methionine, or an amino acid residue which is covalently linked to another amino acid residue of the sequence
  MISC_FEATURE (14)..(14): Xaa is alanine, valine, glycine, serine, or an amino acid residue which is covalently linked to another amino acid residue of the sequence
  MISC_FEATURE (15)..(15): Xaa is glutamic acid, aspartic acid, or an amino acid residue which is covalently linked to another amino acid residue of the sequence
  MISC_FEATURE (22)..(22): Xaa is glycine, alanine, serine, or an amino acid residue which is covalently linked to another amino acid residue of the sequence
  MISC_FEATURE (23)..(23): Xaa is alanine, valine, glycine, serine, or an amino acid residue which is covalently linked to another amino acid residue of the sequence
  MISC_FEATURE (24)..(24): Xaa is isoleucine, leucine, valine, phenylalanine, methionine, or an amino acid residue which is covalently linked to another amino acid residue of the sequence
SGYEVHHQKLVFXXXDVGSNKXXX

SEQ ID NO: 641 - protein, 23 aa, Artificial Sequence
  synthetic
  MISC_FEATURE (12)..(12): Xaa is phenylalanine, tyrosine, valine, leucine, isoleucine, methionine, or an amino acid residue which is covalently linked to another amino acid residue of the sequence
  MISC_FEATURE (13)..(13): Xaa is alanine, valine, glycine, serine, or an amino acid residue which is covalently linked to another amino acid residue of the sequence
  MISC_FEATURE (14)..(14): Xaa is glutamic acid, aspartic acid, or an amino acid residue which is covalently linked to another amino acid residue of the sequence
  MISC_FEATURE (21)..(21): Xaa is glycine, alanine, serine, or an amino acid residue which is covalently linked to another amino acid residue of the sequence
  MISC_FEATURE (22)..(22): Xaa is alanine, valine, glycine, serine, or an amino acid residue which is covalently linked to another amino acid residue of the sequence
  MISC_FEATURE (23)..(23): Xaa is isoleucine, leucine, valine, phenylalanine, methionine, or an amino acid residue which is covalently linked to another amino acid residue of the sequence
GYEVHHQKLVFXXXDVGSNKXXX

SEQ ID NO: 642 - protein, 22 aa, Artificial Sequence
  synthetic
  MISC_FEATURE (11)..(11): Xaa is phenylalanine, tyrosine, valine, leucine, isoleucine, methionine, or an amino acid residue which is covalently linked to another amino acid residue of the sequence
  MISC_FEATURE (12)..(12): Xaa is alanine, valine, glycine, serine, or an amino acid residue which is covalently linked to another amino acid residue of the sequence
  MISC_FEATURE (13)..(13): Xaa is glutamic acid, aspartic acid, or an amino acid residue which is covalently linked to another amino acid residue of the sequence
  MISC_FEATURE (20)..(20): Xaa is glycine, alanine, serine, or an amino acid residue which is covalently linked to another amino acid residue of the sequence
  MISC_FEATURE (21)..(21): Xaa is alanine, valine, glycine, serine, or an amino acid residue which is covalently linked to another amino acid residue of the sequence
  MISC_FEATURE (22)..(22): Xaa is isoleucine, leucine, valine, phenylalanine, methionine, or an amino acid residue which is covalently linked to another amino acid residue of the sequence
YEVHHQKLVFXXXDVGSNKXXX

SEQ ID NO: 643 - protein, 21 aa, Artificial Sequence
  synthetic
  MISC_FEATURE (10)..(10): Xaa is phenylalanine, tyrosine, valine, leucine, isoleucine, methionine, or an amino acid residue which is covalently linked to another amino acid residue of the sequence
  MISC_FEATURE (11)..(11): Xaa is alanine, valine, glycine, serine, or an amino acid residue which is covalently linked to another amino acid residue of the sequence
  MISC_FEATURE (12)..(12): Xaa is glutamic acid, aspartic acid, or an amino acid residue which is covalently linked to another amino acid residue of the sequence
  MISC_FEATURE (19)..(19): Xaa is glycine, alanine, serine, or an amino acid residue which is covalently linked to another amino acid residue of the sequence
  MISC_FEATURE (20)..(20): Xaa is alanine, valine, glycine, serine, or an amino acid residue which is covalently linked to another amino acid residue of the sequence
  MISC_FEATURE (21)..(21): Xaa is isoleucine, leucine, valine, phenylalanine, methionine, or an amino acid residue which is covalently linked to another amino acid residue of the sequence
EVHHQKLVFXXXDVGSNKXXX

SEQ ID NO: 644 - protein, 20 aa, Artificial Sequence
  synthetic
  MISC_FEATURE (9)..(9): Xaa is phenylalanine, tyrosine, valine, leucine, isoleucine, methionine, or an amino acid residue which is covalently linked to another amino acid residue of the sequence
  MISC_FEATURE (10)..(10): Xaa is alanine, valine, glycine, serine, or an amino acid residue which is covalently linked to another amino acid residue of the sequence
  MISC_FEATURE (11)..(11): Xaa is glutamic acid, aspartic acid, or an amino acid residue which is covalently linked to another amino acid residue of the sequence
  MISC_FEATURE (18)..(18): Xaa is glycine, alanine, serine, or an amino acid residue which is covalently linked to another amino acid residue of the sequence
  MISC_FEATURE (19)..(19): Xaa is alanine, valine, glycine, serine, or an amino acid residue which is covalently linked to another amino acid residue of the sequence
  MISC_FEATURE (20)..(20): Xaa is isoleucine, leucine, valine, phenylalanine, methionine, or an amino acid residue which is covalently linked to another amino acid residue of the sequence
VHHQKLVFXXXDVGSNKXXX

SEQ ID NO: 645 - protein, 19 aa, Artificial Sequence
  synthetic
  MISC_FEATURE (8)..(8): Xaa is phenylalanine, tyrosine, valine, leucine, isoleucine, methionine, or an amino acid residue which is covalently linked to another amino acid residue of the sequence
  MISC_FEATURE (9)..(9): Xaa is alanine, valine, glycine, serine, or an amino acid residue which is covalently linked to another amino acid residue of the sequence
  MISC_FEATURE (10)..(10): Xaa is glutamic acid, aspartic acid, or an amino acid residue which is covalently linked to another amino acid residue of the sequence
  MISC_FEATURE (17)..(17): Xaa is glycine, alanine, serine, or an amino acid residue which is covalently linked to another amino acid residue of the sequence
  MISC_FEATURE (18)..(18): Xaa is alanine, valine, glycine, serine, or an amino acid residue which is covalently linked to another amino acid residue of the sequence
  MISC_FEATURE (19)..(19): Xaa is isoleucine, leucine, valine, phenylalanine, methionine, or an amino acid residue which is covalently linked to another amino acid residue of the sequence
HHQKLVFXXXDVGSNKXXX

SEQ ID NO: 646 - protein, 18 aa, Artificial Sequence
  synthetic
  MISC_FEATURE (7)..(7): Xaa is phenylalanine, tyrosine, valine, leucine, isoleucine, methionine, or an amino acid residue which is covalently linked to another amino acid residue of the sequence
  MISC_FEATURE (8)..(8): Xaa is alanine, valine, glycine, serine, or an amino acid residue which is covalently linked to another amino acid residue of the sequence
  MISC_FEATURE (9)..(9): Xaa is glutamic acid, aspartic acid, or an amino acid residue which is covalently linked to another amino acid residue of the sequence
  MISC_FEATURE (16)..(16): Xaa is glycine, alanine, serine, or an amino acid residue which is covalently linked to another amino acid residue of the sequence
  MISC_FEATURE (17)..(17): Xaa is alanine, valine, glycine, serine, or an amino acid residue which is covalently linked to another amino acid residue of the sequence
  MISC_FEATURE (18)..(18): Xaa is isoleucine, leucine, valine, phenylalanine, methionine, or an amino acid residue which is covalently linked to another amino acid residue of the sequence
HQKLVFXXXDVGSNKXXX

SEQ ID NO: 647 - protein, 17 aa, Artificial Sequence
  synthetic
  MISC_FEATURE (6)..(6): Xaa is phenylalanine, tyrosine, valine, leucine, isoleucine, methionine, or an amino acid residue which is covalently linked to another amino acid residue of the sequence
  MISC_FEATURE (7)..(7): Xaa is alanine, valine, glycine, serine, or an amino acid residue which is covalently linked to another amino acid residue of the sequence
  MISC_FEATURE (8)..(8): Xaa is glutamic acid, aspartic acid, or an amino acid residue which is covalently linked to another amino acid residue of the sequence
  MISC_FEATURE (15)..(15): Xaa is glycine, alanine, serine, or an amino acid residue which is covalently linked to another amino acid residue of the sequence
  MISC_FEATURE (16)..(16): Xaa is alanine, valine, glycine, serine, or an amino acid residue which is covalently linked to another amino acid residue of the sequence
  MISC_FEATURE (17)..(17): Xaa is isoleucine, leucine, valine, phenylalanine, methionine, or an amino acid residue which is covalently linked to another amino acid residue of the sequence
QKLVFXXXDVGSNKXXX

SEQ ID NO: 648 - protein, 16 aa, Artificial Sequence
  synthetic
  MISC_FEATURE (5)..(5): Xaa is phenylalanine, tyrosine, valine, leucine, isoleucine, methionine, or an amino acid residue which is covalently linked to another amino acid residue of the sequence
  MISC_FEATURE (6)..(6): Xaa is alanine, valine, glycine, serine, or an amino acid residue which is covalently linked to another amino acid residue of the sequence
  MISC_FEATURE (7)..(7): Xaa is glutamic acid, aspartic acid, or an amino acid residue which is covalently linked to another amino acid residue of the sequence
  MISC_FEATURE (14)..(14): Xaa is glycine, alanine, serine, or an amino acid residue which is covalently linked to another amino acid residue of the sequence
  MISC_FEATURE (15)..(15): Xaa is alanine, valine, glycine, serine, or an amino acid residue which is covalently linked to another amino acid residue of the sequence
  MISC_FEATURE (16)..(16): Xaa is isoleucine, leucine, valine, phenylalanine, methionine, or an amino acid residue which is covalently linked to another amino acid residue of the sequence
KLVFXXXDVGSNKXXX

SEQ ID NO: 649 - protein, 15 aa, Artificial Sequence
  synthetic
  MISC_FEATURE (4)..(4): Xaa is phenylalanine, tyrosine, valine, leucine, isoleucine, methionine, or an amino acid residue which is covalently linked to another amino acid residue of the sequence
  MISC_FEATURE (5)..(5): Xaa is alanine, valine, glycine, serine, or an amino acid residue which is covalently linked to another amino acid residue of the sequence
  MISC_FEATURE (6)..(6): Xaa is glutamic acid, aspartic acid, or an amino acid residue which is covalently linked to another amino acid residue of the sequence
  MISC_FEATURE (13)..(13): Xaa is glycine, alanine, serine, or an amino acid residue which is covalently linked to another amino acid residue of the sequence
  MISC_FEATURE (14)..(14): Xaa is alanine, valine, glycine, serine, or an amino acid residue which is covalently linked to another amino acid residue of the sequence
  MISC_FEATURE (15)..(15): Xaa is isoleucine, leucine, valine, phenylalanine, methionine, or an amino acid residue which is covalently linked to another amino acid residue of the sequence
LVFXXXDVGSNKXXX

SEQ ID NO: 650 - protein, 14 aa, Artificial Sequence
  synthetic
  MISC_FEATURE (3)..(3): Xaa is phenylalanine, tyrosine, valine, leucine, isoleucine, methionine, or an amino acid residue which is covalently linked to another amino acid residue of the sequence
  MISC_FEATURE (4)..(4): Xaa is alanine, valine, glycine, serine, or an amino acid residue which is covalently linked to another amino acid residue of the sequence
  MISC_FEATURE (5)..(5): Xaa is glutamic acid, aspartic acid, or an amino acid residue which is covalently linked to another amino acid residue of the sequence
  MISC_FEATURE (12)..(12): Xaa is glycine, alanine, serine, or an amino acid residue which is covalently linked to another amino acid residue of the sequence
  MISC_FEATURE (13)..(13): Xaa is alanine, valine, glycine, serine, or an amino acid residue which is covalently linked to another amino acid residue of the sequence
  MISC_FEATURE (14)..(14): Xaa is isoleucine, leucine, valine, phenylalanine, methionine, or an amino acid residue which is covalently linked to another amino acid residue of the sequence
VFXXXDVGSNKXXX

SEQ ID NO: 651 - protein, 13 aa, Artificial Sequence
  synthetic
  MISC_FEATURE (2)..(2): Xaa is phenylalanine, tyrosine, valine, leucine, isoleucine, methionine, or an amino acid residue which is covalently linked to another amino acid residue of the sequence
  MISC_FEATURE (3)..(3): Xaa is alanine, valine, glycine, serine, or an amino acid residue which is covalently linked to another amino acid residue of the sequence
  MISC_FEATURE (4)..(4): Xaa is glutamic acid, aspartic acid, or an amino acid residue which is covalently linked to another amino acid residue of the sequence
  MISC_FEATURE (11)..(11): Xaa is glycine, alanine, serine, or an amino acid residue which is covalently linked to another amino acid residue of the sequence
  MISC_FEATURE (12)..(12): Xaa is alanine, valine, glycine, serine, or an amino acid residue which is covalently linked to another amino acid residue of the sequence
  MISC_FEATURE (13)..(13): Xaa is isoleucine, leucine, valine, phenylalanine, methionine, or an amino acid residue which is covalently linked to another amino acid residue of the sequence
FXXXDVGSNKXXX

SEQ ID NO: 652 - protein, 12 aa, Artificial Sequence
  synthetic
  MISC_FEATURE (1)..(1): Xaa is phenylalanine, tyrosine, valine, leucine, isoleucine, methionine, or an amino acid residue which is covalently linked to another amino acid residue of the sequence
  MISC_FEATURE (2)..(2): Xaa is alanine, valine, glycine, serine, or an amino acid residue which is covalently linked to another amino acid residue of the sequence
  MISC_FEATURE (3)..(3): Xaa is glutamic acid, aspartic acid, or an amino acid residue which is covalently linked to another amino acid residue of the sequence
  MISC_FEATURE (10)..(10): Xaa is glycine, alanine, serine, or an amino acid residue which is covalently linked to another amino acid residue of the sequence
  MISC_FEATURE (11)..(11): Xaa is alanine, valine, glycine, serine, or an amino acid residue which is covalently linked to another amino acid residue of the sequence
  MISC_FEATURE (12)..(12): Xaa is isoleucine, leucine, valine, phenylalanine, methionine, or an amino acid residue which is covalently linked to another amino acid residue of the sequence
XXXDVGSNKXXX

SEQ ID NO: 653 - protein, 11 aa, Artificial Sequence
  synthetic
  MISC_FEATURE (1)..(1): Xaa is alanine, valine, glycine, serine, or an amino acid residue which is covalently linked to another amino acid residue of the sequence
  MISC_FEATURE (2)..(2): Xaa is glutamic acid, aspartic acid, or an amino acid residue which is covalently linked to another amino acid residue of the sequence
  MISC_FEATURE (9)..(9): Xaa is glycine, alanine, serine, or an amino acid residue which is covalently linked to another amino acid residue of the sequence
  MISC_FEATURE (10)..(10): Xaa is alanine, valine, glycine, serine, or an amino acid residue which is covalently linked to another amino acid residue of the sequence
XXDVGSNKXXI

SEQ ID NO: 654 - protein, 10 aa, Artificial Sequence
  synthetic
  MISC_FEATURE (1)..(1): Xaa is glutamic acid, aspartic acid, or an amino acid residue which is covalently linked to another amino acid residue of the sequence
  MISC_FEATURE (8)..(8): Xaa is glycine, alanine, serine, or an amino acid residue which is covalently linked to another amino acid residue of the sequence
XDVGSNKXAI

SEQ ID NO: 655 - protein, 30 aa, Artificial Sequence
  synthetic
  MISC_FEATURE (21)..(21): Xaa is alanine, valine, glycine, serine, or an amino acid residue which is covalently linked to another amino acid residue of the sequence
  MISC_FEATURE (22)..(22): Xaa is glutamic acid, aspartic acid, or an amino acid residue which is covalently linked to another amino acid residue of the sequence
  MISC_FEATURE (29)..(29): Xaa is glycine, alanine, serine, or an amino acid residue which is covalently linked to another amino acid residue of the sequence
  MISC_FEATURE (30)..(30): Xaa is alanine, valine, glycine, serine, or an amino acid residue which is covalently linked to another amino acid residue of the sequence
DAEFRHDSGYEVHHQKLVFFXXDVGSNKXX

SEQ ID NO: 656 - protein, 29 aa, Artificial Sequence
  synthetic
  MISC_FEATURE (20)..(20): Xaa is alanine, valine, glycine, serine, or an amino acid residue which is covalently linked to another amino acid residue of the sequence
  MISC_FEATURE (21)..(21): Xaa is glutamic acid, aspartic acid, or an amino acid residue which is covalently linked to another amino acid residue of the sequence
  MISC_FEATURE (28)..(28): Xaa is glycine, alanine, serine, or an amino acid residue which is covalently linked to another amino acid residue of the sequence
  MISC_FEATURE (29)..(29): Xaa is alanine, valine, glycine, serine, or an amino acid residue which is covalently linked to another amino acid residue of the sequence
AEFRHDSGYEVHHQKLVFFXXDVGSNKXX

SEQ ID NO: 657 - protein, 28 aa, Artificial Sequence
  synthetic
  MISC_FEATURE (19)..(19): Xaa is alanine, valine, glycine, serine, or an amino acid residue which is covalently linked to another amino acid residue of the sequence
  MISC_FEATURE (20)..(20): Xaa is glutamic acid, aspartic acid, or an amino acid residue which is covalently linked to another amino acid residue of the sequence
  MISC_FEATURE (27)..(27): Xaa is glycine, alanine, serine, or an amino acid residue which is covalently linked to another amino acid residue of the sequence
  MISC_FEATURE (28)..(28): Xaa is alanine, valine, glycine, serine, or an amino acid residue which is covalently linked to another amino acid residue of the sequence
EFRHDSGYEVHHQKLVFFXXDVGSNKXX

SEQ ID NO: 658 - protein, 27 aa, Artificial Sequence
  synthetic
  MISC_FEATURE (18)..(18): Xaa is alanine, valine, glycine, serine, or an amino acid residue which is covalently linked to another amino acid residue of the sequence
  MISC_FEATURE (19)..(19): Xaa is glutamic acid, aspartic acid, or an amino acid residue which is covalently linked to another amino acid residue of the sequence
  MISC_FEATURE (26)..(26): Xaa is glycine, alanine, serine, or an amino acid residue which is covalently linked to another amino acid residue of the sequence
  MISC_FEATURE (27)..(27): Xaa is alanine, valine, glycine, serine, or an amino acid residue which is covalently linked to another amino acid residue of the sequence
FRHDSGYEVHHQKLVFFXXDVGSNKXX

SEQ ID NO: 659 - protein, 26 aa, Artificial Sequence
  synthetic
  MISC_FEATURE (17)..(17): Xaa is alanine, valine, glycine, serine, or an amino acid residue which is covalently linked to another amino acid residue of the sequence
  MISC_FEATURE (18)..(18): Xaa is glutamic acid, aspartic acid, or an amino acid residue which is covalently linked to another amino acid residue of the sequence
  MISC_FEATURE (25)..(25): Xaa is glycine, alanine, serine, or an amino acid residue which is covalently linked to another amino acid residue of the sequence
  MISC_FEATURE (26)..(26): Xaa is alanine, valine, glycine, serine, or an amino acid residue which is covalently linked to another amino acid residue of the sequence
RHDSGYEVHHQKLVFFXXDVGSNKXX

SEQ ID NO: 660 - protein, 25 aa, Artificial Sequence
  synthetic
  MISC_FEATURE (16)..(16): Xaa is alanine, valine, glycine, serine, or an amino acid residue which is covalently linked to another amino acid residue of the sequence
  MISC_FEATURE (17)..(17): Xaa is glutamic acid, aspartic acid, or an amino acid residue which is covalently linked to another amino acid residue of the sequence
  MISC_FEATURE (24)..(24): Xaa is glycine, alanine, serine, or an amino acid residue which is covalently linked to another amino acid residue of the sequence
  MISC_FEATURE (25)..(25): Xaa is alanine, valine, glycine, serine, or an amino acid residue which is covalently linked to another amino acid residue of the sequence
HDSGYEVHHQKLVFFXXDVGSNKXX

SEQ ID NO: 661 - protein, 24 aa, Artificial Sequence
  synthetic
  MISC_FEATURE (15)..(15): Xaa is alanine, valine, glycine, serine, or an amino acid residue which is covalently linked to another amino acid residue of the sequence
  MISC_FEATURE (16)..(16): Xaa is glutamic acid, aspartic acid, or an amino acid residue which is covalently linked to another amino acid residue of the sequence
  MISC_FEATURE (23)..(23): Xaa is glycine, alanine, serine, or an amino acid residue which is covalently linked to another amino acid residue of the sequence
  MISC_FEATURE (24)..(24): Xaa is alanine, valine, glycine, serine, or an amino acid residue which is covalently linked to another amino acid residue of the sequence
DSGYEVHHQKLVFFXXDVGSNKXX

SEQ ID NO: 662 - protein, 23 aa, Artificial Sequence
  synthetic
  MISC_FEATURE (14)..(14): Xaa is alanine, valine, glycine, serine, or an amino acid residue which is covalently linked to another amino acid residue of the sequence
  MISC_FEATURE (15)..(15): Xaa is glutamic acid, aspartic acid, or an amino acid residue which is covalently linked to another amino acid residue of the sequence
  MISC_FEATURE (22)..(22): Xaa is glycine, alanine, serine, or an amino acid residue which is covalently linked to another amino acid residue of the sequence
  MISC_FEATURE (23)..(23): Xaa is alanine, valine, glycine, serine, or an amino acid residue which is covalently linked to another amino acid residue of the sequence
SGYEVHHQKLVFFXXDVGSNKXX

SEQ ID NO: 663 - protein, 22 aa, Artificial Sequence
  synthetic
  MISC_FEATURE (13)..(13): Xaa is alanine, valine, glycine, serine, or an amino acid residue which is covalently linked to another amino acid residue of the sequence
  MISC_FEATURE (14)..(14): Xaa is glutamic acid, aspartic acid, or an amino acid residue which is covalently linked to another amino acid residue of the sequence
  MISC_FEATURE (21)..(21): Xaa is glycine, alanine, serine, or an amino acid residue which is covalently linked to another amino acid residue of the sequence
  MISC_FEATURE (22)..(22): Xaa is alanine, valine, glycine, serine, or an amino acid residue which is covalently linked to another amino acid residue of the sequence
GYEVHHQKLVFFXXDVGSNKXX

SEQ ID NO: 664 - protein, 21 aa, Artificial Sequence
  synthetic
  MISC_FEATURE (12)..(12): Xaa is alanine, valine, glycine, serine, or an amino acid residue which is covalently linked to another amino acid residue of the sequence
  MISC_FEATURE (13)..(13): Xaa is glutamic acid, aspartic acid, or an amino acid residue which is covalently linked to another amino acid residue of the sequence
  MISC_FEATURE (20)..(20): Xaa is glycine, alanine, serine, or an amino acid residue which is covalently linked to another amino acid residue of the sequence
  MISC_FEATURE (21)..(21): Xaa is alanine, valine, glycine, serine, or an amino acid residue which is covalently linked to another amino acid residue of the sequence
YEVHHQKLVFFXXDVGSNKXX

SEQ ID NO: 665 - protein, 20 aa, Artificial Sequence
  synthetic
  MISC_FEATURE (11)..(11): Xaa is alanine, valine, glycine, serine, or an amino acid residue which is covalently linked to another amino acid residue of the sequence
  MISC_FEATURE (12)..(12): Xaa is glutamic acid, aspartic acid, or an amino acid residue which is covalently linked to another amino acid residue of the sequence
  MISC_FEATURE (19)..(19): Xaa is glycine, alanine, serine, or an amino acid residue which is covalently linked to another amino acid residue of the sequence
  MISC_FEATURE (20)..(20): Xaa is alanine, valine, glycine, serine, or an amino acid residue which is covalently linked to another amino acid residue of the sequence
EVHHQKLVFFXXDVGSNKXX

SEQ ID NO: 666 - protein, 19 aa, Artificial Sequence
  synthetic
  MISC_FEATURE (10)..(10): Xaa is alanine, valine, glycine, serine, or an amino acid residue which is covalently linked to another amino acid residue of the sequence
  MISC_FEATURE (11)..(11): Xaa is glutamic acid, aspartic acid, or an amino acid residue which is covalently linked to another amino acid residue of the sequence
  MISC_FEATURE (18)..(18): Xaa is glycine, alanine, serine, or an amino acid residue which is covalently linked to another amino acid residue of the sequence
  MISC_FEATURE (19)..(19): Xaa is alanine, valine, glycine, serine, or an amino acid residue which is covalently linked to another amino acid residue of the sequence
VHHQKLVFFXXDVGSNKXX

SEQ ID NO: 667 - protein, 18 aa, Artificial Sequence
  synthetic
  MISC_FEATURE (9)..(9): Xaa is alanine, valine, glycine, serine, or an amino acid residue which is covalently linked to another amino acid residue of the sequence
  MISC_FEATURE (10)..(10): Xaa is glutamic acid, aspartic acid, or an amino acid residue which is covalently linked to another amino acid residue of the sequence
  MISC_FEATURE (17)..(17): Xaa is glycine, alanine, serine, or an amino acid residue which is covalently linked to another amino acid residue of the sequence
  MISC_FEATURE (18)..(18): Xaa is alanine, valine, glycine, serine, or an amino acid residue which is covalently linked to another amino acid residue of the sequence
HHQKLVFFXXDVGSNKXX

SEQ ID NO: 668 - protein, 17 aa, Artificial Sequence
  synthetic
  MISC_FEATURE (8)..(8): Xaa is alanine, valine, glycine, serine, or an amino acid residue which is covalently linked to another amino acid residue of the sequence
  MISC_FEATURE (9)..(9): Xaa is glutamic acid, aspartic acid, or an amino acid residue which is covalently linked to another amino acid residue of the sequence
  MISC_FEATURE (16)..(16): Xaa is glycine, alanine, serine, or an amino acid residue which is covalently linked to another amino acid residue of the sequence
  MISC_FEATURE (17)..(17): Xaa is alanine, valine, glycine, serine, or an amino acid residue which is covalently linked to another amino acid residue of the sequence
HQKLVFFXXDVGSNKXX

SEQ ID NO: 669 - protein, 16 aa, Artificial Sequence
  synthetic
  MISC_FEATURE (7)..(7): Xaa is alanine, valine, glycine, serine, or an amino acid residue which is covalently linked to another amino acid residue of the sequence
  MISC_FEATURE (8)..(8): Xaa is glutamic acid, aspartic acid, or an amino acid residue which is covalently linked to another amino acid residue of the sequence
  MISC_FEATURE (15)..(15): Xaa is glycine, alanine, serine, or an amino acid residue which is covalently linked to another amino acid residue of the sequence
  MISC_FEATURE (16)..(16): Xaa is alanine, valine, glycine, serine, or an amino acid residue which is covalently linked to another amino acid residue of the sequence
QKLVFFXXDVGSNKXX

SEQ ID NO: 670 - protein, 15 aa, Artificial Sequence
  synthetic
  MISC_FEATURE (6)..(6): Xaa is alanine, valine, glycine, serine, or an amino acid residue which is covalently linked to another amino acid residue of the sequence
  MISC_FEATURE (7)..(7): Xaa is glutamic acid, aspartic acid, or an amino acid residue which is covalently linked to another amino acid residue of the sequence
  MISC_FEATURE (14)..(14): Xaa is glycine, alanine, serine, or an amino acid residue which is covalently linked to another amino acid residue of the sequence
  MISC_FEATURE (15)..(15): Xaa is alanine, valine, glycine, serine, or an amino acid residue which is covalently linked to another amino acid residue of the sequence
KLVFFXXDVGSNKXX

SEQ ID NO: 671 - protein, 14 aa, Artificial Sequence
  synthetic
  MISC_FEATURE (5)..(5): Xaa is alanine, valine, glycine, serine, or an amino acid residue which is covalently linked to another amino acid residue of the sequence
  MISC_FEATURE (6)..(6): Xaa is glutamic acid, aspartic acid, or an amino acid residue which is covalently linked to another amino acid residue of the sequence
  MISC_FEATURE (13)..(13): Xaa is glycine, alanine, serine, or an amino acid residue which is covalently linked to another amino acid residue of the sequence
  MISC_FEATURE (14)..(14): Xaa is alanine, valine, glycine, serine, or an amino acid residue which is covalently linked to another amino acid residue of the sequence
LVFFXXDVGSNKXX

SEQ ID NO: 672 - protein, 13 aa, Artificial Sequence
  synthetic
  MISC_FEATURE (4)..(4): Xaa is alanine, valine, glycine, serine, or an amino acid residue which is covalently linked to another amino acid residue of the sequence
  MISC_FEATURE (5)..(5): Xaa is glutamic acid, aspartic acid, or an amino acid residue which is covalently linked to another amino acid residue of the sequence
  MISC_FEATURE (12)..(12): Xaa is glycine, alanine, serine, or an amino acid residue which is covalently linked to another amino acid residue of the sequence
  MISC_FEATURE (13)..(13): Xaa is alanine, valine, glycine, serine, or an amino acid residue which is covalently linked to another amino acid residue of the sequence
VFFXXDVGSNKXX

SEQ ID NO: 673 - protein, 12 aa, Artificial Sequence
  synthetic
  MISC_FEATURE (3)..(3): Xaa is alanine, valine, glycine, serine, or an amino acid residue which is covalently linked to another amino acid residue of the sequence
  MISC_FEATURE (4)..(4): Xaa is glutamic acid, aspartic acid, or an amino acid residue which is covalently linked to another amino acid residue of the sequence
  MISC_FEATURE (11)..(11): Xaa is glycine, alanine, serine, or an amino acid residue which is covalently linked to another amino acid residue of the sequence
  MISC_FEATURE (12)..(12): Xaa is alanine, valine, glycine, serine, or an amino acid residue which is covalently linked to another amino acid residue of the sequence
FFXXDVGSNKXX

SEQ ID NO: 674 - protein, 11 aa, Artificial Sequence
  synthetic
  MISC_FEATURE (2)..(2): Xaa is alanine, valine, glycine, serine, or an amino acid residue which is covalently linked to another amino acid residue of the sequence
  MISC_FEATURE (3)..(3): Xaa is glutamic acid, aspartic acid, or an amino acid residue which is covalently linked to another amino acid residue of the sequence
  MISC_FEATURE (10)..(10): Xaa is glycine, alanine, serine, or an amino acid residue which is covalently linked to another amino acid residue of the sequence
  MISC_FEATURE (11)..(11): Xaa is alanine, valine, glycine, serine, or an amino acid residue which is covalently linked to another amino acid residue of the sequence
FXXDVGSNKXX

SEQ ID NO: 675 - protein, 10 aa, Artificial Sequence
  synthetic
  MISC_FEATURE (1)..(1): Xaa is alanine, valine, glycine, serine, or an amino acid residue which is covalently linked to another amino acid residue of the sequence
  MISC_FEATURE (2)..(2): Xaa is glutamic acid, aspartic acid, or an amino acid residue which is covalently linked to another amino acid residue of the sequence
  MISC_FEATURE (9)..(9): Xaa is glycine, alanine, serine, or an amino acid residue which is covalently linked to another amino acid residue of the sequence
  MISC_FEATURE (10)..(10): Xaa is alanine, valine, glycine, serine, or an amino acid residue which is covalently linked to another amino acid residue of the sequence
XXDVGSNKXX

SEQ ID NO: 676 - protein, 9 aa, Artificial Sequence
  synthetic
  MISC_FEATURE (1)..(1): Xaa is glutamic acid, aspartic acid, or an amino acid residue which is covalently linked to another amino acid residue of the sequence
  MISC_FEATURE (8)..(8): Xaa is glycine, alanine, serine, or an amino acid residue which is covalently linked to another amino acid residue of the sequence
XDVGSNKXA

SEQ ID NO: 677 - protein, 29 aa, Artificial Sequence
  synthetic
  MISC_FEATURE (22)..(22): Xaa is glutamic acid, aspartic acid, or an amino acid residue which is covalently linked to another amino acid residue of the sequence
  MISC_FEATURE (29)..(29): Xaa is glycine, alanine, serine, or an amino acid residue which is covalently linked to another amino acid residue of the sequence
DAEFRHDSGYEVHHQKLVFFAXDVGSNKX

SEQ ID NO: 678 - protein, 28 aa, Artificial Sequence
  synthetic
  MISC_FEATURE (21)..(21): Xaa is glutamic acid, aspartic acid, or an amino acid residue which is covalently linked to another amino acid residue of the sequence
  MISC_FEATURE (28)..(28): Xaa is glycine, alanine, serine, or an amino acid residue which is covalently linked to another amino acid residue of the sequence
AEFRHDSGYEVHHQKLVFFAXDVGSNKX

SEQ ID NO: 679 - protein, 27 aa, Artificial Sequence
  synthetic
  MISC_FEATURE (20)..(20): Xaa is glutamic acid, aspartic acid, or an amino acid residue which is covalently linked to another amino acid residue of the sequence
  MISC_FEATURE (27)..(27): Xaa is glycine, alanine, serine, or an amino acid residue which is covalently linked to another amino acid residue of the sequence
EFRHDSGYEVHHQKLVFFAXDVGSNKX

SEQ ID NO: 680 - protein, 26 aa, Artificial Sequence
  synthetic
  MISC_FEATURE (19)..(19): Xaa is glutamic acid, aspartic acid, or an amino acid residue which is covalently linked to another amino acid residue of the sequence
  MISC_FEATURE (26)..(26): Xaa is glycine, alanine, serine, or an amino acid residue which is covalently linked to another amino acid residue of the sequence
FRHDSGYEVHHQKLVFFAXDVGSNKX

SEQ ID NO: 681 - protein, 25 aa, Artificial Sequence
  synthetic
  MISC_FEATURE (18)..(18): Xaa is glutamic acid, aspartic acid, or an amino acid residue which is covalently linked to another amino acid residue of the sequence
  MISC_FEATURE (25)..(25): Xaa is glycine, alanine, serine, or an amino acid residue which is covalently linked to another amino acid residue of the sequence
RHDSGYEVHHQKLVFFAXDVGSNKX

SEQ ID NO: 682 - protein, 24 aa, Artificial Sequence
  synthetic
  MISC_FEATURE (17)..(17): Xaa is glutamic acid, aspartic acid, or an amino acid residue which is covalently linked to another amino acid residue of the sequence
  MISC_FEATURE (24)..(24): Xaa is glycine, alanine, serine, or an amino acid residue which is covalently linked to another amino acid residue of the sequence
HDSGYEVHHQKLVFFAXDVGSNKX

SEQ ID NO: 683 - protein, 23 aa, Artificial Sequence
  synthetic
  MISC_FEATURE (16)..(16): Xaa is glutamic acid, aspartic acid, or an amino acid residue which is covalently linked to another amino acid residue of the sequence
  MISC_FEATURE (23)..(23): Xaa is glycine, alanine, serine, or an amino acid residue which is covalently linked to another amino acid residue of the sequence
DSGYEVHHQKLVFFAXDVGSNKX

SEQ ID NO: 684 - protein, 22 aa, Artificial Sequence
  synthetic
  MISC_FEATURE (15)..(15): Xaa is glutamic acid, aspartic acid, or an amino acid residue which is covalently linked to another amino acid residue of the sequence
  MISC_FEATURE (22)..(22): Xaa is glycine, alanine, serine, or an amino acid residue which is covalently linked to another amino acid residue of the sequence
SGYEVHHQKLVFFAXDVGSNKX

SEQ ID NO: 685 - protein, 21 aa, Artificial Sequence
  synthetic
  MISC_FEATURE (14)..(14): Xaa is glutamic acid, aspartic acid, or an amino acid residue which is covalently linked to another amino acid residue of the sequence
  MISC_FEATURE (21)..(21): Xaa is glycine, alanine, serine, or an amino acid residue which is covalently linked to another amino acid residue of the sequence
GYEVHHQKLVFFAXDVGSNKX

SEQ ID NO: 686 - protein, 20 aa, Artificial Sequence
  synthetic
  MISC_FEATURE (13)..(13): Xaa is glutamic acid, aspartic acid, or an amino acid residue which is covalently linked to another amino acid residue of the sequence
  MISC_FEATURE (20)..(20): Xaa is glycine, alanine, serine, or an amino acid residue which is covalently linked to another amino acid residue of the sequence
YEVHHQKLVFFAXDVGSNKX

SEQ ID NO: 687 - protein, 19 aa, Artificial Sequence
  synthetic
  MISC_FEATURE (12)..(12): Xaa is glutamic acid, aspartic acid, or an amino acid residue which is covalently linked to another amino acid residue of the sequence
  MISC_FEATURE (19)..(19): Xaa is glycine, alanine, serine, or an amino acid residue which is covalently linked to another amino acid residue of the sequence
EVHHQKLVFFAXDVGSNKX

SEQ ID NO: 688 - protein, 18 aa, Artificial Sequence
  synthetic
  MISC_FEATURE (11)..(11): Xaa is glutamic acid, aspartic acid, or an amino acid residue which is covalently linked to another amino acid residue of the sequence
  MISC_FEATURE (18)..(18): Xaa is glycine, alanine, serine, or an amino acid residue which is covalently linked to another amino acid residue of the sequence
VHHQKLVFFAXDVGSNKX

SEQ ID NO: 689 - protein, 17 aa, Artificial Sequence
  synthetic
  MISC_FEATURE (10)..(10): Xaa is glutamic acid, aspartic acid, or an amino acid residue which is covalently linked to another amino acid residue of the sequence
  MISC_FEATURE (17)..(17): Xaa is glycine, alanine, serine, or an amino acid residue which is covalently linked to another amino acid residue of the sequence
HHQKLVFFAXDVGSNKX

SEQ ID NO: 690 - protein, 16 aa, Artificial Sequence
  synthetic
  MISC_FEATURE (9)..(9): Xaa is glutamic acid, aspartic acid, or an amino acid residue which is covalently linked to another amino acid residue of the sequence
  MISC_FEATURE (16)..(16): Xaa is glycine, alanine, serine, or an amino acid residue which is covalently linked to another amino acid residue of the sequence
HQKLVFFAXDVGSNKX

SEQ ID NO: 691 - protein, 15 aa, Artificial Sequence
  synthetic
  MISC_FEATURE (8)..(8): Xaa is glutamic acid, aspartic acid, or an amino acid residue which is covalently linked to another amino acid residue of the sequence
  MISC_FEATURE (15)..(15): Xaa is glycine, alanine, serine, or an amino acid residue which is covalently linked to another amino acid residue of the sequence
QKLVFFAXDVGSNKX

SEQ ID NO: 692 - protein, 14 aa, Artificial Sequence
  synthetic
  MISC_FEATURE (7)..(7): Xaa is glutamic acid, aspartic acid, or an amino acid residue which is covalently linked to another amino acid residue of the sequence
  MISC_FEATURE (14)..(14): Xaa is glycine, alanine, serine, or an amino acid residue which is covalently linked to another amino acid residue of the sequence
KLVFFAXDVGSNKX

SEQ ID NO: 693 - protein, 13 aa, Artificial Sequence
  synthetic
  MISC_FEATURE (6)..(6): Xaa is glutamic acid, aspartic acid, or an amino acid residue which is covalently linked to another amino acid residue of the sequence
  MISC_FEATURE (13)..(13): Xaa is glycine, alanine, serine, or an amino acid residue which is covalently linked to another amino acid residue of the sequence
LVFFAXDVGSNKX

SEQ ID NO: 694 - protein, 12 aa, Artificial Sequence
  synthetic
  MISC_FEATURE (5)..(5): Xaa is glutamic acid, aspartic acid, or an amino acid residue which is covalently linked to another amino acid residue of the sequence
  MISC_FEATURE (12)..(12): Xaa is glycine, alanine, serine, or an amino acid residue which is covalently linked to another amino acid residue of the sequence
VFFAXDVGSNKX

SEQ ID NO: 695 - protein, 11 aa, Artificial Sequence
  synthetic
  MISC_FEATURE (4)..(4): Xaa is glutamic acid, aspartic acid, or an amino acid residue which is covalently linked to another amino acid residue of the sequence
  MISC_FEATURE (11)..(11): Xaa is glycine, alanine, serine, or an amino acid residue which is covalently linked to another amino acid residue of the sequence
FFAXDVGSNKX

SEQ ID NO: 696 - protein, 10 aa, Artificial Sequence
  synthetic
  MISC_FEATURE (3)..(3): Xaa is glutamic acid, aspartic acid, or an amino acid residue which is covalently linked to another amino acid residue of the sequence
  MISC_FEATURE (10)..(10): Xaa is glycine, alanine, serine, or an amino acid residue which is covalently linked to another amino acid residue of the sequence
FAXDVGSNKX

SEQ ID NO: 697 - protein, 9 aa, Artificial Sequence
  synthetic
  MISC_FEATURE (2)..(2): Xaa is glutamic acid, aspartic acid, or an amino acid residue which is covalently linked to another amino acid residue of the sequence
  MISC_FEATURE (9)..(9): Xaa is glycine, alanine, serine, or an amino acid residue which is covalently linked to another amino acid residue of the sequence
AXDVGSNKX

SEQ ID NO: 698 - protein, 8 aa, Artificial Sequence
  synthetic
  MISC_FEATURE (1)..(1): Xaa is glutamic acid, aspartic acid, or an amino acid residue which is covalently linked to another amino acid residue of the sequence
  MISC_FEATURE (8)..(8): Xaa is glycine, alanine, serine, or an amino acid residue which is covalently linked to another amino acid residue of the sequence
XDVGSNKX

SEQ ID NO: 699 - protein, 43 aa, Artificial Sequence
  synthetic
  MISC_FEATURE (12)..(12): Xaa is valine, leucine, isoleucine, alanine, methionine, or an amino acid residue which is covalently linked to another amino acid residue of the sequence
  MISC_FEATURE (13)..(13): Xaa is histidine, tyrosine, serine, methionine, or an amino acid residue which is covalently linked to another amino acid residue of the sequence
  MISC_FEATURE (14)..(14): Xaa is histidine, tyrosine, serine, methionine, or an amino acid residue which is covalently linked to another amino acid residue of the sequence
  MISC_FEATURE (15)..(15): Xaa is glutamine, asparagine, methionine, serine, or an amino acid which is covalently linked to another amino acid residue of the sequence
  MISC_FEATURE (16)..(16): Xaa is lysine, arginine, or an amino acid residue which is covalently linked to another amino acid residue of the sequence
  MISC_FEATURE (17)..(17): Xaa is leucine, isoleucine, valine, phenylalanine, methionine, or an amino acid residue which is covalently linked to another amino acid residue of the sequence
  MISC_FEATURE (18)..(18): Xaa is valine, leucine, isoleucine, alanine, methionine, or an amino acid residue which is covalently linked to another amino acid residue of the sequence
  MISC_FEATURE (19)..(19): Xaa is phenylalanine, tyrosine, valine, leucine, isoleucine, methionine, or an amino acid residue which is covalently linked to another amino acid residue of the sequence
  MISC_FEATURE (20)..(20): Xaa is phenylalanine, tyrosine, valine, leucine, isoleucine, methionine, or an amino acid residue which is covalently linked to another amino acid residue of the sequence
  MISC_FEATURE (24)..(24): Xaa is valine, leucine, isoleucine, alanine, methionine, or an amino acid residue which is covalently linked to another amino acid residue of the sequence
  MISC_FEATURE (25)..(25): Xaa is glycine, alanine, serine, or an amino acid residue which is covalently linked to another amino acid residue of the sequence
  MISC_FEATURE (26)..(26): Xaa is serine, glycine, alanine, threonine, or an amino acid residue which is covalently linked to another amino acid residue of the sequence
  MISC_FEATURE (27)..(27): Xaa is asparagine, glutamine, methionine, or an amino acid residue which is covalently linked to another amino acid residue of the sequence
  MISC_FEATURE (28)..(28): Xaa is lysine, arginine, or an amino acid residue which is covalently linked to another amino acid residue of the sequence
  MISC_FEATURE (29)..(29): Xaa is glycine, alanine, serine, or an amino acid residue which is covalently linked to another amino acid residue of the sequence
  MISC_FEATURE (30)..(30): Xaa is alanine, valine, glycine, serine, or an amino acid residue which is covalently linked to another amino acid residue of the sequence
  MISC_FEATURE (31)..(31): Xaa is isoleucine, leucine, valine, phenylalanine, methionine, or an amino acid residue which is covalently linked to another amino acid residue of the sequence
  MISC_FEATURE (32)..(32): Xaa is isoleucine, leucine, valine, phenylalanine, methionine, or an amino acid residue which is covalently linked to another amino acid residue of the sequence
  MISC_FEATURE (33)..(33): Xaa is glycine, alanine, serine, or an amino acid residue which is covalently linked to another amino acid residue of the sequence
  MISC_FEATURE (34)..(34): Xaa is leucine, isoleucine, valine, phenylalanine, methionine, or an amino acid residue which is covalently linked to another amino acid residue of the sequence
  MISC_FEATURE (35)..(35): Xaa is methionine, valine, leucine, isoleucine, alanine, or an amino acid residue which is covalently linked to another amino acid residue of the sequence
  MISC_FEATURE (36)..(36): Xaa is valine, leucine, isoleucine, alanine, methionine, or an amino acid residue which is covalently linked to another amino acid residue of the sequence
  MISC_FEATURE (37)..(37): Xaa is glycine, alanine, serine, or an amino acid residue which is covalently linked to another amino acid residue of the sequence
  MISC_FEATURE (38)..(38): Xaa is glycine, alanine, serine, or an amino acid residue which is covalently linked to another amino acid residue of the sequence
  MISC_FEATURE (39)..(39): Xaa is valine, leucine, isoleucine, alanine, methionine, or an amino acid residue which is covalently linked to another amino acid residue of the sequence
DAEFRHDSGYEXXXXXXXXXAEDXXXXXXXXXXXXXXXXVIAT

SEQ ID NO: 700 - skipped

SEQ ID NO: 701 - protein, 42 aa, Artificial Sequence
  synthetic
  MISC_FEATURE (11)..(11): Xaa is valine, leucine, isoleucine, alanine, methionine, or an amino acid residue which is covalently linked to another amino acid residue of the sequence
  MISC_FEATURE (12)..(12): Xaa is histidine, tyrosine, serine, methionine, or an amino acid residue which is covalently linked to another amino acid residue of the sequence
  MISC_FEATURE (13)..(13): Xaa is histidine, tyrosine, serine, methionine, or an amino acid residue which is covalently linked to another amino acid residue of the sequence
  MISC_FEATURE (14)..(14): Xaa is glutamine, asparagine, methionine, serine, or an amino acid which is covalently linked to another amino acid residue of the sequence
  MISC_FEATURE (15)..(15): Xaa is lysine, arginine, or an amino acid residue which is covalently linked to another amino acid residue of the sequence
  MISC_FEATURE (16)..(16): Xaa is leucine, isoleucine, valine, phenylalanine, methionine, or an amino acid residue which is covalently linked to another amino acid residue of the sequence
  MISC_FEATURE (17)..(17): Xaa is valine, leucine, isoleucine, alanine, methionine, or an amino acid residue which is covalently linked to another amino acid residue of the sequence
  MISC_FEATURE (18)..(18): Xaa is phenylalanine, tyrosine, valine, leucine, isoleucine, methionine, or an amino acid residue which is covalently linked to another amino acid residue of the sequence
  MISC_FEATURE (19)..(19): Xaa is phenylalanine, tyrosine, valine, leucine, isoleucine, methionine, or an amino acid residue which is covalently linked to another amino acid residue of the sequence
  MISC_FEATURE (23)..(23): Xaa is valine, leucine, isoleucine, alanine, methionine, or an amino acid residue which is covalently linked to another amino acid residue of the sequence
  MISC_FEATURE (24)..(24): Xaa is glycine, alanine, serine, or an amino acid residue which is covalently linked to another amino acid residue of the sequence
  MISC_FEATURE (25)..(25): Xaa is serine, glycine, alanine, threonine, or an amino acid residue which is covalently linked to another amino acid residue of the sequence
  MISC_FEATURE (26)..(26): Xaa is asparagine, glutamine, methionine, or an amino acid residue which is covalently linked to another amino acid residue of the sequence
  MISC_FEATURE (27)..(27): Xaa is lysine, arginine, or an amino acid residue which is covalently linked to another amino acid residue of the sequence
  MISC_FEATURE (28)..(28): Xaa is glycine, alanine, serine, or an amino acid residue which is covalently linked to another amino acid residue of the sequence
  MISC_FEATURE (29)..(29): Xaa is alanine, valine, glycine, serine, or an amino acid residue which is covalently linked to another amino acid residue of the sequence
  MISC_FEATURE (30)..(30): Xaa is isoleucine, leucine, valine, phenylalanine, methionine, or an amino acid residue which is covalently linked to another amino acid residue of the sequence
  MISC_FEATURE (31)..(31): Xaa is isoleucine, leucine, valine, phenylalanine, methionine, or an amino acid residue which is covalently linked to another amino acid residue of the sequence
  MISC_FEATURE (32)..(32): Xaa is glycine, alanine, serine, or an amino acid residue which is covalently linked to another amino acid residue of the sequence
  MISC_FEATURE (33)..(33): Xaa is leucine, isoleucine, valine, phenylalanine, methionine, or an amino acid residue which is covalently linked to another amino acid residue of the sequence
  MISC_FEATURE (34)..(34): Xaa is methionine, valine, leucine, isoleucine, alanine, or an amino acid residue which is covalently linked to another amino acid residue of the sequence
  MISC_FEATURE (35)..(35): Xaa is valine, leucine, isoleucine, alanine, methionine, or an amino acid residue which is covalently linked to another amino acid residue of the sequence
  MISC_FEATURE (36)..(36): Xaa is glycine, alanine, serine, or an amino acid residue which is covalently linked to another amino acid residue of the sequence
  MISC_FEATURE (37)..(37): Xaa is glycine, alanine, serine, or an amino acid residue which is covalently linked to another amino acid residue of the sequence
  MISC_FEATURE (38)..(38): Xaa is valine, leucine, isoleucine, alanine, methionine, or an amino acid residue which is covalently linked to another amino acid residue of the sequence
AEFRHDSGYEXXXXXXXXXAEDXXXXXXXXXXXXXXXXVIAT

SEQ ID NO: 702 - protein, 41 aa, Artificial Sequence
  synthetic
  MISC_FEATURE (10)..(10): Xaa is valine, leucine, isoleucine, alanine, methionine, or an amino acid residue which is covalently linked to another amino acid residue of the sequence
  MISC_FEATURE (11)..(11): Xaa is histidine, tyrosine, serine, methionine, or an amino acid residue which is covalently linked to another amino acid residue of the sequence
  MISC_FEATURE (12)..(12): Xaa is histidine, tyrosine, serine, methionine, or an amino acid residue which is covalently linked to another amino acid residue of the sequence
  MISC_FEATURE (13)..(13): Xaa is glutamine, asparagine, methionine, serine, or an amino acid which is covalently linked to another amino acid residue of the sequence
  MISC_FEATURE (14)..(14): Xaa is lysine, arginine, or an amino acid residue which is covalently linked to another amino acid residue of the sequence
  MISC_FEATURE (15)..(15): Xaa is leucine, isoleucine, valine, phenylalanine, methionine, or an amino acid residue which is covalently linked to another amino acid residue of the sequence
  MISC_FEATURE (16)..(16): Xaa is valine, leucine, isoleucine, alanine, methionine, or an amino acid residue which is covalently linked to another amino acid residue of the sequence
  MISC_FEATURE (17)..(17): Xaa is phenylalanine, tyrosine, valine, leucine, isoleucine, methionine, or an amino acid residue which is covalently linked to another amino acid residue of the sequence
  MISC_FEATURE (18)..(18): Xaa is phenylalanine, tyrosine, valine, leucine, isoleucine, methionine, or an amino acid residue which is covalently linked to another amino acid residue of the sequence
  MISC_FEATURE (22)..(22): Xaa is valine, leucine, isoleucine, alanine, methionine, or an amino acid residue which is covalently linked to another amino acid residue of the sequence
  MISC_FEATURE (23)..(23): Xaa is glycine, alanine, serine, or an amino acid residue which is covalently linked to another amino acid residue of the sequence
  MISC_FEATURE (24)..(24): Xaa is serine, glycine, alanine, threonine, or an amino acid residue which is covalently linked to another amino acid residue of the sequence
  MISC_FEATURE (25)..(25): Xaa is asparagine, glutamine, methionine, or an amino acid residue which is covalently linked to another amino acid residue of the sequence
  MISC_FEATURE (26)..(26): Xaa is lysine, arginine, or an amino acid residue which is covalently linked to another amino acid residue of the sequence
  MISC_FEATURE (27)..(27): Xaa is glycine, alanine, serine, or an amino acid residue which is covalently linked to another amino acid residue of the sequence
  MISC_FEATURE (28)..(28): Xaa is alanine, valine, glycine, serine, or an amino acid residue which is covalently linked to another amino acid residue of the sequence
  MISC_FEATURE (29)..(29): Xaa is isoleucine, leucine, valine, phenylalanine, methionine, or an amino acid residue which is covalently linked to another amino acid residue of the sequence
  MISC_FEATURE (30)..(30): Xaa is isoleucine, leucine, valine, phenylalanine, methionine, or an amino acid residue which is covalently linked to another amino acid residue of the sequence
  MISC_FEATURE (31)..(31): Xaa is glycine, alanine, serine, or an amino acid residue which is covalently linked to another amino acid residue of the sequence
  MISC_FEATURE (32)..(32): Xaa is leucine, isoleucine, valine, phenylalanine, methionine, or an amino acid residue which is covalently linked to another amino acid residue of the sequence
  MISC_FEATURE (33)..(33): Xaa is methionine, valine, leucine, isoleucine, alanine, or an amino acid residue which is covalently linked to another amino acid residue of the sequence
  MISC_FEATURE (34)..(34): Xaa is valine, leucine, isoleucine, alanine, methionine, or an amino acid residue which is covalently linked to another amino acid residue of the sequence
  MISC_FEATURE (35)..(35): Xaa is glycine, alanine, serine, or an amino acid residue which is covalently linked to another amino acid residue of the sequence
  MISC_FEATURE (36)..(36): Xaa is glycine, alanine, serine, or an amino acid residue which is covalently linked to another amino acid residue of the sequence
  MISC_FEATURE (37)..(37): Xaa is valine, leucine, isoleucine, alanine, methionine, or an amino acid residue which is covalently linked to another amino acid residue of the sequence
EFRHDSGYEXXXXXXXXXAEDXXXXXXXXXXXXXXXXVIAT

SEQ ID NO: 703 - protein, 40 aa, Artificial Sequence
  synthetic
  MISC_FEATURE (9)..(9): Xaa is valine, leucine, isoleucine, alanine, methionine, or an amino acid residue which is covalently linked to another amino acid residue of the sequence
  MISC_FEATURE (10)..(10): Xaa is histidine, tyrosine, serine, methionine, or an amino acid residue which is covalently linked to another amino acid residue of the sequence
  MISC_FEATURE (11)..(11): Xaa is histidine, tyrosine, serine, methionine, or an amino acid residue which is covalently linked to another amino acid residue of the sequence
  MISC_FEATURE (12)..(12): Xaa is glutamine, asparagine, methionine, serine, or an amino acid which is covalently linked to another amino acid residue of the sequence
  MISC_FEATURE (13)..(13): Xaa is lysine, arginine, or an amino acid residue which is covalently linked to another amino acid residue of the sequence
  MISC_FEATURE (14)..(14): Xaa is leucine, isoleucine, valine, phenylalanine, methionine, or an amino acid residue which is covalently linked to another amino acid residue of the sequence
  MISC_FEATURE (15)..(15): Xaa is valine, leucine, isoleucine, alanine, methionine, or an amino acid residue which is covalently linked to another amino acid residue of the sequence
  MISC_FEATURE (16)..(16): Xaa is phenylalanine, tyrosine, valine, leucine, isoleucine, methionine, or an amino acid residue which is covalently linked to another amino acid residue of the sequence
  MISC_FEATURE (17)..(17): Xaa is phenylalanine, tyrosine, valine, leucine, isoleucine, methionine, or an amino acid residue which is covalently linked to another amino acid residue of the sequence
  MISC_FEATURE (21)..(21): Xaa is valine, leucine, isoleucine, alanine, methionine, or an amino acid residue which is covalently linked to another amino acid residue of the sequence
  MISC_FEATURE (22)..(22): Xaa is glycine, alanine, serine, or an amino acid residue which is covalently linked to another amino acid residue of the sequence
  MISC_FEATURE (23)..(23): Xaa is serine, glycine, alanine, threonine, or an amino acid residue which is covalently linked to another amino acid residue of the sequence
  MISC_FEATURE (24)..(24): Xaa is asparagine, glutamine, methionine, or an amino acid residue which is covalently linked to another amino acid residue of the sequence
  MISC_FEATURE (25)..(25): Xaa is lysine, arginine, or an amino acid residue which is covalently linked to another amino acid residue of the sequence
  MISC_FEATURE (26)..(26): Xaa is glycine, alanine, serine, or an amino acid residue which is covalently linked to another amino acid residue of the sequence
  MISC_FEATURE (27)..(27): Xaa is alanine, valine, glycine, serine, or an amino acid residue which is covalently linked to another amino acid residue of the sequence
  MISC_FEATURE (28)..(28): Xaa is isoleucine, leucine, valine, phenylalanine, methionine, or an amino acid residue which is covalently linked to another amino acid residue of the sequence
  MISC_FEATURE (29)..(29): Xaa is isoleucine, leucine, valine, phenylalanine, methionine, or an amino acid residue which is covalently linked to another amino acid residue of the sequence
  MISC_FEATURE (30)..(30): Xaa is glycine, alanine, serine, or an amino acid residue which is covalently linked to another amino acid residue of the sequence
  MISC_FEATURE (31)..(31): Xaa is leucine, isoleucine, valine, phenylalanine, methionine, or an amino acid residue which is covalently linked to another amino acid residue of the sequence
  MISC_FEATURE (32)..(32): Xaa is methionine, valine, leucine, isoleucine, alanine, or an amino acid residue which is covalently linked to another amino acid residue of the sequence
  MISC_FEATURE (33)..(33): Xaa is valine, leucine, isoleucine, alanine, methionine, or an amino acid residue which is covalently linked to another amino acid residue of the sequence
  MISC_FEATURE (34)..(34): Xaa is glycine, alanine, serine, or an amino acid residue which is covalently linked to another amino acid residue of the sequence
  MISC_FEATURE (35)..(35): Xaa is glycine, alanine, serine, or an amino acid residue which is covalently linked to another amino acid residue of the sequence
  MISC_FEATURE (36)..(36): Xaa is valine, leucine, isoleucine, alanine, methionine, or an amino acid residue which is covalently linked to another amino acid residue of the sequence
FRHDSGYEXXXXXXXXXAEDXXXXXXXXXXXXXXXXVIAT

SEQ ID NO: 704 - protein, 39 aa, Artificial Sequence
  synthetic
  MISC_FEATURE (8)..(8): Xaa is valine, leucine, isoleucine, alanine, methionine, or an amino acid residue which is covalently linked to another amino acid residue of the sequence
  MISC_FEATURE (9)..(9): Xaa is histidine, tyrosine, serine, methionine, or an amino acid residue which is covalently linked to another amino acid residue of the sequence
  MISC_FEATURE (10)..(10): Xaa is histidine, tyrosine, serine, methionine, or an amino acid residue which is covalently linked to another amino acid residue of the sequence
  MISC_FEATURE (11)..(11): Xaa is glutamine, asparagine, methionine, serine, or an amino acid which is covalently linked to another amino acid residue of the sequence
  MISC_FEATURE (12)..(12): Xaa is lysine, arginine, or an amino acid residue which is covalently linked to another amino acid residue of the sequence
  MISC_FEATURE (13)..(13): Xaa is leucine, isoleucine, valine, phenylalanine, methionine, or an amino acid residue which is covalently linked to another amino acid residue of the sequence
  MISC_FEATURE (14)..(14): Xaa is valine, leucine, isoleucine, alanine, methionine, or an amino acid residue which is covalently linked to another amino acid residue of the sequence
  MISC_FEATURE (15)..(15): Xaa is phenylalanine, tyrosine, valine, leucine, isoleucine, methionine, or an amino acid residue which is covalently linked to another amino acid residue of the sequence
  MISC_FEATURE (16)..(16): Xaa is phenylalanine, tyrosine, valine, leucine, isoleucine, methionine, or an amino acid residue which is covalently linked to another amino acid residue of the sequence
  MISC_FEATURE (20)..(20): Xaa is valine, leucine, isoleucine, alanine, methionine, or an amino acid residue which is covalently linked to another amino acid residue of the sequence
  MISC_FEATURE (21)..(21): Xaa is glycine, alanine, serine, or an amino acid residue which is covalently linked to another amino acid residue of the sequence
  MISC_FEATURE (22)..(22): Xaa is serine, glycine, alanine, threonine, or an amino acid residue which is covalently linked to another amino acid residue of the sequence
  MISC_FEATURE (23)..(23): Xaa is asparagine, glutamine, methionine, or an amino acid residue which is covalently linked to another amino acid residue of the sequence
  MISC_FEATURE (24)..(24): Xaa is lysine, arginine, or an amino acid residue which is covalently linked to another amino acid residue of the sequence
  MISC_FEATURE (25)..(25): Xaa is glycine, alanine, serine, or an amino acid residue which is covalently linked to another amino acid residue of the sequence
  MISC_FEATURE (26)..(26): Xaa is alanine, valine, glycine, serine, or an amino acid residue which is covalently linked to another amino acid residue of the sequence
  MISC_FEATURE (27)..(27): Xaa is isoleucine, leucine, valine, phenylalanine, methionine, or an amino acid residue which is covalently linked to another amino acid residue of the sequence
  MISC_FEATURE (28)..(28): Xaa is isoleucine, leucine, valine, phenylalanine, methionine, or an amino acid residue which is covalently linked to another amino acid residue of the sequence
  MISC_FEATURE (29)..(29): Xaa is glycine, alanine, serine, or an amino acid residue which is covalently linked to another amino acid residue of the sequence
  MISC_FEATURE (30)..(30): Xaa is leucine, isoleucine, valine, phenylalanine, methionine, or an amino acid residue which is covalently linked to another amino acid residue of the sequence
  MISC_FEATURE (31)..(31): Xaa is methionine, valine, leucine, isoleucine, alanine, or an amino acid residue which is covalently linked to another amino acid residue of the sequence
  MISC_FEATURE (32)..(32): Xaa is valine, leucine, isoleucine, alanine, methionine, or an amino acid residue which is covalently linked to another amino acid residue of the sequence
  MISC_FEATURE (33)..(33): Xaa is glycine, alanine, serine, or an amino acid residue which is covalently linked to another amino acid residue of the sequence
  MISC_FEATURE (34)..(34): Xaa is glycine, alanine, serine, or an amino acid residue which is covalently linked to another amino acid residue of the sequence
  MISC_FEATURE (35)..(35): Xaa is valine, leucine, isoleucine, alanine, methionine, or an amino acid residue which is covalently linked to another amino acid residue of the sequence
RHDSGYEXXXXXXXXXAEDXXXXXXXXXXXXXXXXVIAT

SEQ ID NO: 705 - protein, 38 aa, Artificial Sequence
  synthetic
  MISC_FEATURE (7)..(7): Xaa is valine, leucine, isoleucine, alanine, methionine, or an amino acid residue which is covalently linked to another amino acid residue of the sequence
  MISC_FEATURE (8)..(8): Xaa is histidine, tyrosine, serine, methionine, or an amino acid residue which is covalently linked to another amino acid residue of the sequence
  MISC_FEATURE (9)..(9): Xaa is histidine, tyrosine, serine, methionine, or an amino acid residue which is covalently linked to another amino acid residue of the sequence
  MISC_FEATURE (10)..(10): Xaa is glutamine, asparagine, methionine, serine, or an amino acid which is covalently linked to another amino acid residue of the sequence
  MISC_FEATURE (11)..(11): Xaa is lysine, arginine, or an amino acid residue which is covalently linked to another amino acid residue of the sequence
  MISC_FEATURE (12)..(12): Xaa is leucine, isoleucine, valine, phenylalanine, methionine, or an amino acid residue which is covalently linked to another amino acid residue of the sequence
  MISC_FEATURE (13)..(13): Xaa is valine, leucine, isoleucine, alanine, methionine, or an amino acid residue which is covalently linked to another amino acid residue of the sequence
  MISC_FEATURE (14)..(14): Xaa is phenylalanine, tyrosine, valine, leucine, isoleucine, methionine, or an amino acid residue which is covalently linked to another amino acid residue of the sequence
  MISC_FEATURE (15)..(15): Xaa is phenylalanine, tyrosine, valine, leucine, isoleucine, methionine, or an amino acid residue which is covalently linked to another amino acid residue of the sequence
  MISC_FEATURE (19)..(19): Xaa is valine, leucine, isoleucine, alanine, methionine, or an amino acid residue which is covalently linked to another amino acid residue of the sequence
  MISC_FEATURE (20)..(20): Xaa is glycine, alanine, serine, or an amino acid residue which is covalently linked to another amino acid residue of the sequence
  MISC_FEATURE (21)..(21): Xaa is serine, glycine, alanine, threonine, or an amino acid residue which is covalently linked to another amino acid residue of the sequence
  MISC_FEATURE (22)..(22): Xaa is asparagine, glutamine, methionine, or an amino acid residue which is covalently linked to another amino acid residue of the sequence
  MISC_FEATURE (23)..(23): Xaa is lysine, arginine, or an amino acid residue which is covalently linked to another amino acid residue of the sequence
  MISC_FEATURE (24)..(24): Xaa is glycine, alanine, serine, or an amino acid residue which is covalently linked to another amino acid residue of the sequence
  MISC_FEATURE (25)..(25): Xaa is alanine, valine, glycine, serine, or an amino acid residue which is covalently linked to another amino acid residue of the sequence
  MISC_FEATURE (26)..(26): Xaa is isoleucine, leucine, valine, phenylalanine, methionine, or an amino acid residue which is covalently linked to another amino acid residue of the sequence
  MISC_FEATURE (27)..(27): Xaa is isoleucine, leucine, valine, phenylalanine, methionine, or an amino acid residue which is covalently linked to another amino acid residue of the sequence
  MISC_FEATURE (28)..(28): Xaa is glycine, alanine, serine, or an amino acid residue which is covalently linked to another amino acid residue of the sequence
  MISC_FEATURE (29)..(29): Xaa is leucine, isoleucine, valine, phenylalanine, methionine, or an amino acid residue which is covalently linked to another amino acid residue of the sequence
  MISC_FEATURE (30)..(30): Xaa is methionine, valine, leucine, isoleucine, alanine, or an amino acid residue which is covalently linked to another amino acid residue of the sequence
  MISC_FEATURE (31)..(31): Xaa is valine, leucine, isoleucine, alanine, methionine, or an amino acid residue which is covalently linked to another amino acid residue of the sequence
  MISC_FEATURE (32)..(32): Xaa is glycine, alanine, serine, or an amino acid residue which is covalently linked to another amino acid residue of the sequence
  MISC_FEATURE (33)..(33): Xaa is glycine, alanine, serine, or an amino acid residue which is covalently linked to another amino acid residue of the sequence
  MISC_FEATURE (34)..(34): Xaa is valine, leucine, isoleucine, alanine, methionine, or an amino acid residue which is covalently linked to another amino acid residue of the sequence
HDSGYEXXXXXXXXXAEDXXXXXXXXXXXXXXXXVIAT

SEQ ID NO: 706 - protein, 37 aa, Artificial Sequence
  synthetic
  MISC_FEATURE (6)..(6): Xaa is valine, leucine, isoleucine, alanine, methionine, or an amino acid residue which is covalently linked to another amino acid residue of the sequence
  MISC_FEATURE (7)..(7): Xaa is histidine, tyrosine, serine, methionine, or an amino acid residue which is covalently linked to another amino acid residue of the sequence
  MISC_FEATURE (8)..(8): Xaa is histidine, tyrosine, serine, methionine, or an amino acid residue which is covalently linked to another amino acid residue of the sequence
  MISC_FEATURE (9)..(9): Xaa is glutamine, asparagine, methionine, serine, or an amino acid which is covalently linked to another amino acid residue of the sequence
  MISC_FEATURE (10)..(10): Xaa is lysine, arginine, or an amino acid residue which is covalently linked to another amino acid residue of the sequence
  MISC_FEATURE (11)..(11): Xaa is leucine, isoleucine, valine, phenylalanine, methionine, or an amino acid residue which is covalently linked to another amino acid residue of the sequence
  MISC_FEATURE (12)..(12): Xaa is valine, leucine, isoleucine, alanine, methionine, or an amino acid residue which is covalently linked to another amino acid residue of the sequence
  MISC_FEATURE (13)..(13): Xaa is phenylalanine, tyrosine, valine, leucine, isoleucine, methionine, or an amino acid residue which is covalently linked to another amino acid residue of the sequence
  MISC_FEATURE (14)..(14): Xaa is phenylalanine, tyrosine, valine, leucine, isoleucine, methionine, or an amino acid residue which is covalently linked to another amino acid residue of the sequence
  MISC_FEATURE (18)..(18): Xaa is valine, leucine, isoleucine, alanine, methionine, or an amino acid residue which is covalently linked to another amino acid residue of the sequence
  MISC_FEATURE (19)..(19): Xaa is glycine, alanine, serine, or an amino acid residue which is covalently linked to another amino acid residue of the sequence
  MISC_FEATURE (20)..(20): Xaa is serine, glycine, alanine, threonine, or an amino acid residue which is covalently linked to another amino acid residue of the sequence
  MISC_FEATURE (21)..(21): Xaa is asparagine, glutamine, methionine, or an amino acid residue which is covalently linked to another amino acid residue of the sequence
  MISC_FEATURE (22)..(22): Xaa is lysine, arginine, or an amino acid residue which is covalently linked to another amino acid residue of the sequence
  MISC_FEATURE (23)..(23): Xaa is glycine, alanine, serine, or an amino acid residue which is covalently linked to another amino acid residue of the sequence
  MISC_FEATURE (24)..(24): Xaa is alanine, valine, glycine, serine, or an amino acid residue which is covalently linked to another amino acid residue of the sequence
  MISC_FEATURE (25)..(25): Xaa is isoleucine, leucine, valine, phenylalanine, methionine, or an amino acid residue which is covalently linked to another amino acid residue of the sequence
  MISC_FEATURE (26)..(26): Xaa is isoleucine, leucine, valine, phenylalanine, methionine, or an amino acid residue which is covalently linked to another amino acid residue of the sequence
  MISC_FEATURE (27)..(27): Xaa is glycine, alanine, serine, or an amino acid residue which is covalently linked to another amino acid residue of the sequence
  MISC_FEATURE (28)..(28): Xaa is leucine, isoleucine, valine, phenylalanine, methionine, or an amino acid residue which is covalently linked to another amino acid residue of the sequence
  MISC_FEATURE (29)..(29): Xaa is methionine, valine, leucine, isoleucine, alanine, or an amino acid residue which is covalently linked to another amino acid residue of the sequence
  MISC_FEATURE (30)..(30): Xaa is valine, leucine, isoleucine, alanine, methionine, or an amino acid residue which is covalently linked to another amino acid residue of the sequence
  MISC_FEATURE (31)..(31): Xaa is glycine, alanine, serine, or an amino acid residue which is covalently linked to another amino acid residue of the sequence
  MISC_FEATURE (32)..(32): Xaa is glycine, alanine, serine, or an amino acid residue which is covalently linked to another amino acid residue of the sequence
  MISC_FEATURE (33)..(33): Xaa is valine, leucine, isoleucine, alanine, methionine, or an amino acid residue which is covalently linked to another amino acid residue of the sequence
DSGYEXXXXXXXXXAEDXXXXXXXXXXXXXXXXVIAT

SEQ ID NO: 707 - protein, 36 aa, Artificial Sequence
  synthetic
  MISC_FEATURE (5)..(5): Xaa is valine, leucine, isoleucine, alanine, methionine, or an amino acid residue which is covalently linked to another amino acid residue of the sequence
  MISC_FEATURE (6)..(6): Xaa is histidine, tyrosine, serine, methionine, or an amino acid residue which is covalently linked to another amino acid residue of the sequence
  MISC_FEATURE (7)..(7): Xaa is histidine, tyrosine, serine, methionine, or an amino acid residue which is covalently linked to another amino acid residue of the sequence
  MISC_FEATURE (8)..(8): Xaa is glutamine, asparagine, methionine, serine, or an amino acid which is covalently linked to another amino acid residue of the sequence
  MISC_FEATURE (9)..(9): Xaa is lysine, arginine, or an amino acid residue which is covalently linked to another amino acid residue of the sequence
  MISC_FEATURE (10)..(10): Xaa is leucine, isoleucine, valine, phenylalanine, methionine, or an amino acid residue which is covalently linked to another amino acid residue of the sequence
  MISC_FEATURE (11)..(11): Xaa is valine, leucine, isoleucine, alanine, methionine, or an amino acid residue which is covalently linked to another amino acid residue of the sequence
  MISC_FEATURE (12)..(12): Xaa is phenylalanine, tyrosine, valine, leucine, isoleucine, methionine, or an amino acid residue which is covalently linked to another amino acid residue of the sequence
  MISC_FEATURE (13)..(13): Xaa is phenylalanine, tyrosine, valine, leucine, isoleucine, methionine, or an amino acid residue which is covalently linked to another amino acid residue of the sequence
  MISC_FEATURE (17)..(17): Xaa is valine, leucine, isoleucine, alanine, methionine, or an amino acid residue which is covalently linked to another amino acid residue of the sequence
  MISC_FEATURE (18)..(18): Xaa is glycine, alanine, serine, or an amino acid residue which is covalently linked to another amino acid residue of the sequence
  MISC_FEATURE (19)..(19): Xaa is serine, glycine, alanine, threonine, or an amino acid residue which is covalently linked to another amino acid residue of the sequence
  MISC_FEATURE (20)..(20): Xaa is asparagine, glutamine, methionine, or an amino acid residue which is covalently linked to another amino acid residue of the sequence
  MISC_FEATURE (21)..(21): Xaa is lysine, arginine, or an amino acid residue which is covalently linked to another amino acid residue of the sequence
  MISC_FEATURE (22)..(22): Xaa is glycine, alanine, serine, or an amino acid residue which is covalently linked to another amino acid residue of the sequence
  MISC_FEATURE (23)..(23): Xaa is alanine, valine, glycine, serine, or an amino acid residue which is covalently linked to another amino acid residue of the sequence
  MISC_FEATURE (24)..(24): Xaa is isoleucine, leucine, valine, phenylalanine, methionine, or an amino acid residue which is covalently linked to another amino acid residue of the sequence
  MISC_FEATURE (25)..(25): Xaa is isoleucine, leucine, valine, phenylalanine, methionine, or an amino acid residue which is covalently linked to another amino acid residue of the sequence
  MISC_FEATURE (26)..(26): Xaa is glycine, alanine, serine, or an amino acid residue which is covalently linked to another amino acid residue of the sequence
  MISC_FEATURE (27)..(27): Xaa is leucine, isoleucine, valine, phenylalanine, methionine, or an amino acid residue which is covalently linked to another amino acid residue of the sequence
  MISC_FEATURE (28)..(28): Xaa is methionine, valine, leucine, isoleucine, alanine, or an amino acid residue which is covalently linked to another amino acid residue of the sequence
  MISC_FEATURE (29)..(29): Xaa is valine, leucine, isoleucine, alanine, methionine, or an amino acid residue which is covalently linked to another amino acid residue of the sequence
  MISC_FEATURE (30)..(30): Xaa is glycine, alanine, serine, or an amino acid residue which is covalently linked to another amino acid residue of the sequence
  MISC_FEATURE (31)..(31): Xaa is glycine, alanine, serine, or an amino acid residue which is covalently linked to another amino acid residue of the sequence
  MISC_FEATURE (32)..(32): Xaa is valine, leucine, isoleucine, alanine, methionine, or an amino acid residue which is covalently linked to another amino acid residue of the sequence
SGYEXXXXXXXXXAEDXXXXXXXXXXXXXXXXVIAT

SEQ ID NO: 708 - protein, 35 aa, Artificial Sequence
  synthetic
  MISC_FEATURE (4)..(4): Xaa is valine, leucine, isoleucine, alanine, methionine, or an amino acid residue which is covalently linked to another amino acid residue of the sequence
  MISC_FEATURE (5)..(5): Xaa is histidine, tyrosine, serine, methionine, or an amino acid residue which is covalently linked to another amino acid residue of the sequence
  MISC_FEATURE (6)..(6): Xaa is histidine, tyrosine, serine, methionine, or an amino acid residue which is covalently linked to another amino acid residue of the sequence
  MISC_FEATURE (7)..(7): Xaa is glutamine, asparagine, methionine, serine, or an amino acid which is covalently linked to another amino acid residue of the sequence
  MISC_FEATURE (8)..(8): Xaa is lysine, arginine, or an amino acid residue which is covalently linked to another amino acid residue of the sequence
  MISC_FEATURE (9)..(9): Xaa is leucine, isoleucine, valine, phenylalanine, methionine, or an amino acid residue which is covalently linked to another amino acid residue of the sequence
  MISC_FEATURE (10)..(10): Xaa is valine, leucine, isoleucine, alanine, methionine, or an amino acid residue which is covalently linked to another amino acid residue of the sequence
  MISC_FEATURE (11)..(11): Xaa is phenylalanine, tyrosine, valine, leucine, isoleucine, methionine, or an amino acid residue which is covalently linked to another amino acid residue of the sequence
  MISC_FEATURE (12)..(12): Xaa is phenylalanine, tyrosine, valine, leucine, isoleucine, methionine, or an amino acid residue which is covalently linked to another amino acid residue of the sequence
  MISC_FEATURE (16)..(16): Xaa is valine, leucine, isoleucine, alanine, methionine, or an amino acid residue which is covalently linked to another amino acid residue of the sequence
  MISC_FEATURE (17)..(17): Xaa is glycine, alanine, serine, or an amino acid residue which is covalently linked to another amino acid residue of the sequence
  MISC_FEATURE (18)..(18): Xaa is serine, glycine, alanine, threonine, or an amino acid residue which is covalently linked to another amino acid residue of the sequence
  MISC_FEATURE (19)..(19): Xaa is asparagine, glutamine, methionine, or an amino acid residue which is covalently linked to another amino acid residue of the sequence
  MISC_FEATURE (20)..(20): Xaa is lysine, arginine, or an amino acid residue which is covalently linked to another amino acid residue of the sequence
  MISC_FEATURE (21)..(21): Xaa is glycine, alanine, serine, or an amino acid residue which is covalently linked to another amino acid residue of the sequence
  MISC_FEATURE (22)..(22): Xaa is alanine, valine, glycine, serine, or an amino acid residue which is covalently linked to another amino acid residue of the sequence
  MISC_FEATURE (23)..(23): Xaa is isoleucine, leucine, valine, phenylalanine, methionine, or an amino acid residue which is covalently linked to another amino acid residue of the sequence
  MISC_FEATURE (24)..(24): Xaa is isoleucine, leucine, valine, phenylalanine, methionine, or an amino acid residue which is covalently linked to another amino acid residue of the sequence
  MISC_FEATURE (25)..(25): Xaa is glycine, alanine, serine, or an amino acid residue which is covalently linked to another amino acid residue of the sequence
  MISC_FEATURE (26)..(26): Xaa is leucine, isoleucine, valine, phenylalanine, methionine, or an amino acid residue which is covalently linked to another amino acid residue of the sequence
  MISC_FEATURE (27)..(27): Xaa is methionine, valine, leucine, isoleucine, alanine, or an amino acid residue which is covalently linked to another amino acid residue of the sequence
  MISC_FEATURE (28)..(28): Xaa is valine, leucine, isoleucine, alanine, methionine, or an amino acid residue which is covalently linked to another amino acid residue of the sequence
  MISC_FEATURE (29)..(29): Xaa is glycine, alanine, serine, or an amino acid residue which is covalently linked to another amino acid residue of the sequence
  MISC_FEATURE (30)..(30): Xaa is glycine, alanine, serine, or an amino acid residue which is covalently linked to another amino acid residue of the sequence
  MISC_FEATURE (31)..(31): Xaa is valine, leucine, isoleucine, alanine, methionine, or an amino acid residue which is covalently linked to another amino acid residue of the sequence
GYEXXXXXXXXXAEDXXXXXXXXXXXXXXXXVIAT

SEQ ID NO: 709 - protein, 34 aa, Artificial Sequence
  synthetic
  MISC_FEATURE (3)..(3): Xaa is valine, leucine, isoleucine, alanine, methionine, or an amino acid residue which is covalently linked to another amino acid residue of the sequence
  MISC_FEATURE (4)..(4): Xaa is histidine, tyrosine, serine, methionine, or an amino acid residue which is covalently linked to another amino acid residue of the sequence
  MISC_FEATURE (5)..(5): Xaa is histidine, tyrosine, serine, methionine, or an amino acid residue which is covalently linked to another amino acid residue of the sequence
  MISC_FEATURE (6)..(6): Xaa is glutamine, asparagine, methionine, serine, or an amino acid which is covalently linked to another amino acid residue of the sequence
  MISC_FEATURE (7)..(7): Xaa is lysine, arginine, or an amino acid residue which is covalently linked to another amino acid residue of the sequence
  MISC_FEATURE (8)..(8): Xaa is leucine, isoleucine, valine, phenylalanine, methionine, or an amino acid residue which is covalently linked to another amino acid residue of the sequence
  MISC_FEATURE (9)..(9): Xaa is valine, leucine, isoleucine, alanine, methionine, or an amino acid residue which is covalently linked to another amino acid residue of the sequence
  MISC_FEATURE (10)..(10): Xaa is phenylalanine, tyrosine, valine, leucine, isoleucine, methionine, or an amino acid residue which is covalently linked to another amino acid residue of the sequence
  MISC_FEATURE (11)..(11): Xaa is phenylalanine, tyrosine, valine, leucine, isoleucine, methionine, or an amino acid residue which is covalently linked to another amino acid residue of the sequence
  MISC_FEATURE (15)..(15): Xaa is valine, leucine, isoleucine, alanine, methionine, or an amino acid residue which is covalently linked to another amino acid residue of the sequence
  MISC_FEATURE (16)..(16): Xaa is glycine, alanine, serine, or an amino acid residue which is covalently linked to another amino acid residue of the sequence
  MISC_FEATURE (17)..(17): Xaa is serine, glycine, alanine, threonine, or an amino acid residue which is covalently linked to another amino acid residue of the sequence
  MISC_FEATURE (18)..(18): Xaa is asparagine, glutamine, methionine, or an amino acid residue which is covalently linked to another amino acid residue of the sequence
  MISC_FEATURE (19)..(19): Xaa is lysine, arginine, or an amino acid residue which is covalently linked to another amino acid residue of the sequence
  MISC_FEATURE (20)..(20): Xaa is glycine, alanine, serine, or an amino acid residue which is covalently linked to another amino acid residue of the sequence
  MISC_FEATURE (21)..(21): Xaa is alanine, valine, glycine, serine, or an amino acid residue which is covalently linked to another amino acid residue of the sequence
  MISC_FEATURE (22)..(22): Xaa is isoleucine, leucine, valine, phenylalanine, methionine, or an amino acid residue which is covalently linked to another amino acid residue of the sequence
  MISC_FEATURE (23)..(23): Xaa is isoleucine, leucine, valine, phenylalanine, methionine, or an amino acid residue which is covalently linked to another amino acid residue of the sequence
  MISC_FEATURE (24)..(24): Xaa is glycine, alanine, serine, or an amino acid residue which is covalently linked to another amino acid residue of the sequence
  MISC_FEATURE (25)..(25): Xaa is leucine, isoleucine, valine, phenylalanine, methionine, or an amino acid residue which is covalently linked to another amino acid residue of the sequence
  MISC_FEATURE (26)..(26): Xaa is methionine, valine, leucine, isoleucine, alanine, or an amino acid residue which is covalently linked to another amino acid residue of the sequence
  MISC_FEATURE (27)..(27): Xaa is valine, leucine, isoleucine, alanine, methionine, or an amino acid residue which is covalently linked to another amino acid residue of the sequence
  MISC_FEATURE (28)..(28): Xaa is glycine, alanine, serine, or an amino acid residue which is covalently linked to another amino acid residue of the sequence
  MISC_FEATURE (29)..(29): Xaa is glycine, alanine, serine, or an amino acid residue which is covalently linked to another amino acid residue of the sequence
  MISC_FEATURE (30)..(30): Xaa is valine, leucine, isoleucine, alanine, methionine, or an amino acid residue which is covalently linked to another amino acid residue of the sequence
YEXXXXXXXXXAEDXXXXXXXXXXXXXXXXVIAT

SEQ ID NO: 710 - protein, 33 aa, Artificial Sequence
  synthetic
  MISC_FEATURE (2)..(2): Xaa is valine, leucine, isoleucine, alanine, methionine, or an amino acid residue which is covalently linked to another amino acid residue of the sequence
  MISC_FEATURE (3)..(3): Xaa is histidine, tyrosine, serine, methionine, or an amino acid residue which is covalently linked to another amino acid residue of the sequence
  MISC_FEATURE (4)..(4): Xaa is histidine, tyrosine, serine, methionine, or an amino acid residue which is covalently linked to another amino acid residue of the sequence
  MISC_FEATURE (5)..(5): Xaa is glutamine, asparagine, methionine, serine, or an amino acid which is covalently linked to another amino acid residue of the sequence
  MISC_FEATURE (6)..(6): Xaa is lysine, arginine, or an amino acid residue which is covalently linked to another amino acid residue of the sequence
  MISC_FEATURE (7)..(7): Xaa is leucine, isoleucine, valine, phenylalanine, methionine, or an amino acid residue which is covalently linked to another amino acid residue of the sequence
  MISC_FEATURE (8)..(8): Xaa is valine, leucine, isoleucine, alanine, methionine, or an amino acid residue which is covalently linked to another amino acid residue of the sequence
  MISC_FEATURE (9)..(9): Xaa is phenylalanine, tyrosine, valine, leucine, isoleucine, methionine, or an amino acid residue which is covalently linked to another amino acid residue of the sequence
  MISC_FEATURE (10)..(10): Xaa is phenylalanine, tyrosine, valine, leucine, isoleucine, methionine, or an amino acid residue which is covalently linked to another amino acid residue of the sequence
  MISC_FEATURE (14)..(14): Xaa is valine, leucine, isoleucine, alanine, methionine, or an amino acid residue which is covalently linked to another amino acid residue of the sequence
  MISC_FEATURE (15)..(15): Xaa is glycine, alanine, serine, or an amino acid residue which is covalently linked to another amino acid residue of the sequence
  MISC_FEATURE (16)..(16): Xaa is serine, glycine, alanine, threonine, or an amino acid residue which is covalently linked to another amino acid residue of the sequence
  MISC_FEATURE (17)..(17): Xaa is asparagine, glutamine, methionine, or an amino acid residue which is covalently linked to another amino acid residue of the sequence
  MISC_FEATURE (18)..(18): Xaa is lysine, arginine, or an amino acid residue which is covalently linked to another amino acid residue of the sequence
  MISC_FEATURE (19)..(19): Xaa is glycine, alanine, serine, or an amino acid residue which is covalently linked to another amino acid residue of the sequence
  MISC_FEATURE (20)..(20): Xaa is alanine, valine, glycine, serine, or an amino acid residue which is covalently linked to another amino acid residue of the sequence
  MISC_FEATURE (21)..(21): Xaa is isoleucine, leucine, valine, phenylalanine, methionine, or an amino acid residue which is covalently linked to another amino acid residue of the sequence
  MISC_FEATURE (22)..(22): Xaa is isoleucine, leucine, valine, phenylalanine, methionine, or an amino acid residue which is covalently linked to another amino acid residue of the sequence
  MISC_FEATURE (23)..(23): Xaa is glycine, alanine, serine, or an amino acid residue which is covalently linked to another amino acid residue of the sequence
  MISC_FEATURE (24)..(24): Xaa is leucine, isoleucine, valine, phenylalanine, methionine, or an amino acid residue which is covalently linked to another amino acid residue of the sequence
  MISC_FEATURE (25)..(25): Xaa is methionine, valine, leucine, isoleucine, alanine, or an amino acid residue which is covalently linked to another amino acid residue of the sequence
  MISC_FEATURE (26)..(26): Xaa is valine, leucine, isoleucine, alanine, methionine, or an amino acid residue which is covalently linked to another amino acid residue of the sequence
  MISC_FEATURE (27)..(27): Xaa is glycine, alanine, serine, or an amino acid residue which is covalently linked to another amino acid residue of the sequence
  MISC_FEATURE (28)..(28): Xaa is glycine, alanine, serine, or an amino acid residue which is covalently linked to another amino acid residue of the sequence
  MISC_FEATURE (29)..(29): Xaa is valine, leucine, isoleucine, alanine, methionine, or an amino acid residue which is covalently linked to another amino acid residue of the sequence
EXXXXXXXXXAEDXXXXXXXXXXXXXXXXVIAT

SEQ ID NO: 711 - protein, 32 aa, Artificial Sequence
  synthetic
  MISC_FEATURE (1)..(1): Xaa is valine, leucine, isoleucine, alanine, methionine, or an amino acid residue which is covalently linked to another amino acid residue of the sequence
  MISC_FEATURE (2)..(2): Xaa is histidine, tyrosine, serine, methionine, or an amino acid residue which is covalently linked to another amino acid residue of the sequence
  MISC_FEATURE (3)..(3): Xaa is histidine, tyrosine, serine, methionine, or an amino acid residue which is covalently linked to another amino acid residue of the sequence
  MISC_FEATURE (4)..(4): Xaa is glutamine, asparagine, methionine, serine, or an amino acid which is covalently linked to another amino acid residue of the sequence
  MISC_FEATURE (5)..(5): Xaa is lysine, arginine, or an amino acid residue which is covalently linked to another amino acid residue of the sequence
  MISC_FEATURE (6)..(6): Xaa is leucine, isoleucine, valine, phenylalanine, methionine, or an amino acid residue which is covalently linked to another amino acid residue of the sequence
  MISC_FEATURE (7)..(7): Xaa is valine, leucine, isoleucine, alanine, methionine, or an amino acid residue which is covalently linked to another amino acid residue of the sequence
  MISC_FEATURE (8)..(8): Xaa is phenylalanine, tyrosine, valine, leucine, isoleucine, methionine, or an amino acid residue which is covalently linked to another amino acid residue of the sequence
  MISC_FEATURE (9)..(9): Xaa is phenylalanine, tyrosine, valine, leucine, isoleucine, methionine, or an amino acid residue which is covalently linked to another amino acid residue of the sequence
  MISC_FEATURE (13)..(13): Xaa is valine, leucine, isoleucine, alanine, methionine, or an amino acid residue which is covalently linked to another amino acid residue of the sequence
  MISC_FEATURE (14)..(14): Xaa is glycine, alanine, serine, or an amino acid residue which is covalently linked to another amino acid residue of the sequence
  MISC_FEATURE (15)..(15): Xaa is serine, glycine, alanine, threonine, or an amino acid residue which is covalently linked to another amino acid residue of the sequence
  MISC_FEATURE (16)..(16): Xaa is asparagine, glutamine, methionine, or an amino acid residue which is covalently linked to another amino acid residue of the sequence
  MISC_FEATURE (17)..(17): Xaa is lysine, arginine, or an amino acid residue which is covalently linked to another amino acid residue of the sequence
  MISC_FEATURE (18)..(18): Xaa is glycine, alanine, serine, or an amino acid residue which is covalently linked to another amino acid residue of the sequence
  MISC_FEATURE (19)..(19): Xaa is alanine, valine, glycine, serine, or an amino acid residue which is covalently linked to another amino acid residue of the sequence
  MISC_FEATURE (20)..(20): Xaa is isoleucine, leucine, valine, phenylalanine, methionine, or an amino acid residue which is covalently linked to another amino acid residue of the sequence
  MISC_FEATURE (21)..(21): Xaa is isoleucine, leucine, valine, phenylalanine, methionine, or an amino acid residue which is covalently linked to another amino acid residue of the sequence
  MISC_FEATURE (22)..(22): Xaa is glycine, alanine, serine, or an amino acid residue which is covalently linked to another amino acid residue of the sequence
  MISC_FEATURE (23)..(23): Xaa is leucine, isoleucine, valine, phenylalanine, methionine, or an amino acid residue which is covalently linked to another amino acid residue of the sequence
  MISC_FEATURE (24)..(24): Xaa is methionine, valine, leucine, isoleucine, alanine, or an amino acid residue which is covalently linked to another amino acid residue of the sequence
  MISC_FEATURE (25)..(25): Xaa is valine, leucine, isoleucine, alanine, methionine, or an amino acid residue which is covalently linked to another amino acid residue of the sequence
  MISC_FEATURE (26)..(26): Xaa is glycine, alanine, serine, or an amino acid residue which is covalently linked to another amino acid residue of the sequence
  MISC_FEATURE (27)..(27): Xaa is glycine, alanine, serine, or an amino acid residue which is covalently linked to another amino acid residue of the sequence
  MISC_FEATURE (28)..(28): Xaa is valine, leucine, isoleucine, alanine, methionine, or an amino acid residue which is covalently linked to another amino acid residue of the sequence
XXXXXXXXXAEDXXXXXXXXXXXXXXXXVIAT

SEQ ID NO: 712 - protein, 31 aa, Artificial Sequence
  synthetic
  MISC_FEATURE (1)..(1): Xaa is histidine, tyrosine, serine, methionine, or an amino acid residue which is covalently linked to another amino acid residue of the sequence
  MISC_FEATURE (2)..(2): Xaa is histidine, tyrosine, serine, methionine, or an amino acid residue which is covalently linked to another amino acid residue of the sequence
  MISC_FEATURE (3)..(3): Xaa is glutamine, asparagine, methionine, serine, or an amino acid which is covalently linked to another amino acid residue of the sequence
  MISC_FEATURE (4)..(4): Xaa is lysine, arginine, or an amino acid residue which is covalently linked to another amino acid residue of the sequence
  MISC_FEATURE (5)..(5): Xaa is leucine, isoleucine, valine, phenylalanine, methionine, or an amino acid residue which is covalently linked to another amino acid residue of the sequence
  MISC_FEATURE (6)..(6): Xaa is valine, leucine, isoleucine, alanine, methionine, or an amino acid residue which is covalently linked to another amino acid residue of the sequence
  MISC_FEATURE (7)..(7): Xaa is phenylalanine, tyrosine, valine, leucine, isoleucine, methionine, or an amino acid residue which is covalently linked to another amino acid residue of the sequence
  MISC_FEATURE (8)..(8): Xaa is phenylalanine, tyrosine, valine, leucine, isoleucine, methionine, or an amino acid residue which is covalently linked to another amino acid residue of the sequence
  MISC_FEATURE (12)..(12): Xaa is valine, leucine, isoleucine, alanine, methionine, or an amino acid residue which is covalently linked to another amino acid residue of the sequence
  MISC_FEATURE (13)..(13): Xaa is glycine, alanine, serine, or an amino acid residue which is covalently linked to another amino acid residue of the sequence
  MISC_FEATURE (14)..(14): Xaa is serine, glycine, alanine, threonine, or an amino acid residue which is covalently linked to another amino acid residue of the sequence
  MISC_FEATURE (15)..(15): Xaa is asparagine, glutamine, methionine, or an amino acid residue which is covalently linked to another amino acid residue of the sequence
  MISC_FEATURE (16)..(16): Xaa is lysine, arginine, or an amino acid residue which is covalently linked to another amino acid residue of the sequence
  MISC_FEATURE (17)..(17): Xaa is glycine, alanine, serine, or an amino acid residue which is covalently linked to another amino acid residue of the sequence
  MISC_FEATURE (18)..(18): Xaa is alanine, valine, glycine, serine, or an amino acid residue which is covalently linked to another amino acid residue of the sequence
  MISC_FEATURE (19)..(19): Xaa is isoleucine, leucine, valine, phenylalanine, methionine, or an amino acid residue which is covalently linked to another amino acid residue of the sequence
  MISC_FEATURE (20)..(20): Xaa is isoleucine, leucine, valine, phenylalanine, methionine, or an amino acid residue which is covalently linked to another amino acid residue of the sequence
  MISC_FEATURE (21)..(21): Xaa is glycine, alanine, serine, or an amino acid residue which is covalently linked to another amino acid residue of the sequence
  MISC_FEATURE (22)..(22): Xaa is leucine, isoleucine, valine, phenylalanine, methionine, or an amino acid residue which is covalently linked to another amino acid residue of the sequence
  MISC_FEATURE (23)..(23): Xaa is methionine, valine, leucine, isoleucine, alanine, or an amino acid residue which is covalently linked to another amino acid residue of the sequence
  MISC_FEATURE (24)..(24): Xaa is valine, leucine, isoleucine, alanine, methionine, or an amino acid residue which is covalently linked to another amino acid residue of the sequence
  MISC_FEATURE (25)..(25): Xaa is glycine, alanine, serine, or an amino acid residue which is covalently linked to another amino acid residue of the sequence
  MISC_FEATURE (26)..(26): Xaa is glycine, alanine, serine, or an amino acid residue which is covalently linked to another amino acid residue of the sequence
XXXXXXXXAEDXXXXXXXXXXXXXXXVVIAT

SEQ ID NO: 713 - protein, 30 aa, Artificial Sequence
  synthetic
  MISC_FEATURE (1)..(1): Xaa is histidine, tyrosine, serine, methionine, or an amino acid residue which is covalently linked to another amino acid residue of the sequence
  MISC_FEATURE (2)..(2): Xaa is glutamine, asparagine, methionine, serine, or an amino acid which is covalently linked to another amino acid residue of the sequence
  MISC_FEATURE (3)..(3): Xaa is lysine, arginine, or an amino acid residue which is covalently linked to another amino acid residue of the sequence
  MISC_FEATURE (4)..(4): Xaa is leucine, isoleucine, valine, phenylalanine, methionine, or an amino acid residue which is covalently linked to another amino acid residue of the sequence
  MISC_FEATURE (5)..(5): Xaa is valine, leucine, isoleucine, alanine, methionine, or an amino acid residue which is covalently linked to another amino acid residue of the sequence
  MISC_FEATURE (6)..(6): Xaa is phenylalanine, tyrosine, valine, leucine, isoleucine, methionine, or an amino acid residue which is covalently linked to another amino acid residue of the sequence
  MISC_FEATURE (7)..(7): Xaa is phenylalanine, tyrosine, valine, leucine, isoleucine, methionine, or an amino acid residue which is covalently linked to another amino acid residue of the sequence
  MISC_FEATURE (11)..(11): Xaa is valine, leucine, isoleucine, alanine, methionine, or an amino acid residue which is covalently linked to another amino acid residue of the sequence
  MISC_FEATURE (12)..(12): Xaa is glycine, alanine, serine, or an amino acid residue which is covalently linked to another amino acid residue of the sequence
  MISC_FEATURE (13)..(13): Xaa is serine, glycine, alanine, threonine, or an amino acid residue which is covalently linked to another amino acid residue of the sequence
  MISC_FEATURE (14)..(14): Xaa is asparagine, glutamine, methionine, or an amino acid residue which is covalently linked to another amino acid residue of the sequence
  MISC_FEATURE (15)..(15): Xaa is lysine, arginine, or an amino acid residue which is covalently linked to another amino acid residue of the sequence
  MISC_FEATURE (16)..(16): Xaa is glycine, alanine, serine, or an amino acid residue which is covalently linked to another amino acid residue of the sequence
  MISC_FEATURE (17)..(17): Xaa is alanine, valine, glycine, serine, or an amino acid residue which is covalently linked to another amino acid residue of the sequence
  MISC_FEATURE (18)..(18): Xaa is isoleucine, leucine, valine, phenylalanine, methionine, or an amino acid residue which is covalently linked to another amino acid residue of the sequence
  MISC_FEATURE (19)..(19): Xaa is isoleucine, leucine, valine, phenylalanine, methionine, or an amino acid residue which is covalently linked to another amino acid residue of the sequence
  MISC_FEATURE (20)..(20): Xaa is glycine, alanine, serine, or an amino acid residue which is covalently linked to another amino acid residue of the sequence
  MISC_FEATURE (21)..(21): Xaa is leucine, isoleucine, valine, phenylalanine, methionine, or an amino acid residue which is covalently linked to another amino acid residue of the sequence
  MISC_FEATURE (22)..(22): Xaa is methionine, valine, leucine, isoleucine, alanine, or an amino acid residue which is covalently linked to another amino acid residue of the sequence
  MISC_FEATURE (23)..(23): Xaa is valine, leucine, isoleucine, alanine, methionine, or an amino acid residue which is covalently linked to another amino acid residue of the sequence
  MISC_FEATURE (24)..(24): Xaa is glycine, alanine, serine, or an amino acid residue which is covalently linked to another amino acid residue of the sequence
XXXXXXXAEDXXXXXXXXXXXXXXGVVIAT

SEQ ID NO: 714 - protein, 29 aa, Artificial Sequence
  synthetic
  MISC_FEATURE (1)..(1): Xaa is glutamine, asparagine, methionine, serine, or an amino acid which is covalently linked to another amino acid residue of the sequence
  MISC_FEATURE (2)..(2): Xaa is lysine, arginine, or an amino acid residue which is covalently linked to another amino acid residue of the sequence
  MISC_FEATURE (3)..(3): Xaa is leucine, isoleucine, valine, phenylalanine, methionine, or an amino acid residue which is covalently linked to another amino acid residue of the sequence
  MISC_FEATURE (4)..(4): Xaa is valine, leucine, isoleucine, alanine, methionine, or an amino acid residue which is covalently linked to another amino acid residue of the sequence
  MISC_FEATURE (5)..(5): Xaa is phenylalanine, tyrosine, valine, leucine, isoleucine, methionine, or an amino acid residue which is covalently linked to another amino acid residue of the sequence
  MISC_FEATURE (6)..(6): Xaa is phenylalanine, tyrosine, valine, leucine, isoleucine, methionine, or an amino acid residue which is covalently linked to another amino acid residue of the sequence
  MISC_FEATURE (10)..(10): Xaa is valine, leucine, isoleucine, alanine, methionine, or an amino acid residue which is covalently linked to another amino acid residue of the sequence
  MISC_FEATURE (11)..(11): Xaa is glycine, alanine, serine, or an amino acid residue which is covalently linked to another amino acid residue of the sequence
  MISC_FEATURE (12)..(12): Xaa is serine, glycine, alanine, threonine, or an amino acid residue which is covalently linked to another amino acid residue of the sequence
  MISC_FEATURE (13)..(13): Xaa is asparagine, glutamine, methionine, or an amino acid residue which is covalently linked to another amino acid residue of the sequence
  MISC_FEATURE (14)..(14): Xaa is lysine, arginine, or an amino acid residue which is covalently linked to another amino acid residue of the sequence
  MISC_FEATURE (15)..(15): Xaa is glycine, alanine, serine, or an amino acid residue which is covalently linked to another amino acid residue of the sequence
  MISC_FEATURE (16)..(16): Xaa is alanine, valine, glycine, serine, or an amino acid residue which is covalently linked to another amino acid residue of the sequence
  MISC_FEATURE (17)..(17): Xaa is isoleucine, leucine, valine, phenylalanine, methionine, or an amino acid residue which is covalently linked to another amino acid residue of the sequence
  MISC_FEATURE (18)..(18): Xaa is isoleucine, leucine, valine, phenylalanine, methionine, or an amino acid residue which is covalently linked to another amino acid residue of the sequence
  MISC_FEATURE (19)..(19): Xaa is glycine, alanine, serine, or an amino acid residue which is covalently linked to another amino acid residue of the sequence
  MISC_FEATURE (20)..(20): Xaa is leucine, isoleucine, valine, phenylalanine, methionine, or an amino acid residue which is covalently linked to another amino acid residue of the sequence
  MISC_FEATURE (21)..(21): Xaa is methionine, valine, leucine, isoleucine, alanine, or an amino acid residue which is covalently linked to another amino acid residue of the sequence
  MISC_FEATURE (22)..(22): Xaa is valine, leucine, isoleucine, alanine, methionine, or an amino acid residue which is covalently linked to another amino acid residue of the sequence
XXXXXXAEDXXXXXXXXXXXXXGGVVIAT

SEQ ID NO: 715 - protein, 28 aa, Artificial Sequence
  synthetic
  MISC_FEATURE (1)..(1): Xaa is lysine, arginine, or an amino acid residue which is covalently linked to another amino acid residue of the sequence
  MISC_FEATURE (2)..(2): Xaa is leucine, isoleucine, valine, phenylalanine, methionine, or an amino acid residue which is covalently linked to another amino acid residue of the sequence
  MISC_FEATURE (3)..(3): Xaa is valine, leucine, isoleucine, alanine, methionine, or an amino acid residue which is covalently linked to another amino acid residue of the sequence
  MISC_FEATURE (4)..(4): Xaa is phenylalanine, tyrosine, valine, leucine, isoleucine, methionine, or an amino acid residue which is covalently linked to another amino acid residue of the sequence
  MISC_FEATURE (5)..(5): Xaa is phenylalanine, tyrosine, valine, leucine, isoleucine, methionine, or an amino acid residue which is covalently linked to another amino acid residue of the sequence
  MISC_FEATURE (9)..(9): Xaa is valine, leucine, isoleucine, alanine, methionine, or an amino acid residue which is covalently linked to another amino acid residue of the sequence
  MISC_FEATURE (10)..(10): Xaa is glycine, alanine, serine, or an amino acid residue which is covalently linked to another amino acid residue of the sequence
  MISC_FEATURE (11)..(11): Xaa is serine, glycine, alanine, threonine, or an amino acid residue which is covalently linked to another amino acid residue of the sequence
  MISC_FEATURE (12)..(12): Xaa is asparagine, glutamine, methionine, or an amino acid residue which is covalently linked to another amino acid residue of the sequence
  MISC_FEATURE (13)..(13): Xaa is lysine, arginine, or an amino acid residue which is covalently linked to another amino acid residue of the sequence
  MISC_FEATURE (14)..(14): Xaa is glycine, alanine, serine, or an amino acid residue which is covalently linked to another amino acid residue of the sequence
  MISC_FEATURE (15)..(15): Xaa is alanine, valine, glycine, serine, or an amino acid residue which is covalently linked to another amino acid residue of the sequence
  MISC_FEATURE (16)..(16): Xaa is isoleucine, leucine, valine, phenylalanine, methionine, or an amino acid residue which is covalently linked to another amino acid residue of the sequence
  MISC_FEATURE (17)..(17): Xaa is isoleucine, leucine, valine, phenylalanine, methionine, or an amino acid residue which is covalently linked to another amino acid residue of the sequence
  MISC_FEATURE (18)..(18): Xaa is glycine, alanine, serine, or an amino acid residue which is covalently linked to another amino acid residue of the sequence
  MISC_FEATURE (19)..(19): Xaa is leucine, isoleucine, valine, phenylalanine, methionine, or an amino acid residue which is covalently linked to another amino acid residue of the sequence
  MISC_FEATURE (20)..(20): Xaa is methionine, valine, leucine, isoleucine, alanine, or an amino acid residue which is covalently linked to another amino acid residue of the sequence
XXXXXAEDXXXXXXXXXXXXVGGVVIAT

SEQ ID NO: 716 - protein, 27 aa, Artificial Sequence
  synthetic
  MISC_FEATURE (1)..(1): Xaa is leucine, isoleucine, valine, phenylalanine, methionine, or an amino acid residue which is covalently linked to another amino acid residue of the sequence
  MISC_FEATURE (2)..(2): Xaa is valine, leucine, isoleucine, alanine, methionine, or an amino acid residue which is covalently linked to another amino acid residue of the sequence
  MISC_FEATURE (3)..(3): Xaa is phenylalanine, tyrosine, valine, leucine, isoleucine, methionine, or an amino acid residue which is covalently linked to another amino acid residue of the sequence
  MISC_FEATURE (4)..(4): Xaa is phenylalanine, tyrosine, valine, leucine, isoleucine, methionine, or an amino acid residue which is covalently linked to another amino acid residue of the sequence
  MISC_FEATURE (8)..(8): Xaa is valine, leucine, isoleucine, alanine, methionine, or an amino acid residue which is covalently linked to another amino acid residue of the sequence
  MISC_FEATURE (9)..(9): Xaa is glycine, alanine, serine, or an amino acid residue which is covalently linked to another amino acid residue of the sequence
  MISC_FEATURE (10)..(10): Xaa is serine, glycine, alanine, threonine, or an amino acid residue which is covalently linked to another amino acid residue of the sequence
  MISC_FEATURE (11)..(11): Xaa is asparagine, glutamine, methionine, or an amino acid residue which is covalently linked to another amino acid residue of the sequence
  MISC_FEATURE (12)..(12): Xaa is lysine, arginine, or an amino acid residue which is covalently linked to another amino acid residue of the sequence
  MISC_FEATURE (13)..(13): Xaa is glycine, alanine, serine, or an amino acid residue which is covalently linked to another amino acid residue of the sequence
  MISC_FEATURE (14)..(14): Xaa is alanine, valine, glycine, serine, or an amino acid residue which is covalently linked to another amino acid residue of the sequence
  MISC_FEATURE (15)..(15): Xaa is isoleucine, leucine, valine, phenylalanine, methionine, or an amino acid residue which is covalently linked to another amino acid residue of the sequence
  MISC_FEATURE (16)..(16): Xaa is isoleucine, leucine, valine, phenylalanine, methionine, or an amino acid residue which is covalently linked to another amino acid residue of the sequence
  MISC_FEATURE (17)..(17): Xaa is glycine, alanine, serine, or an amino acid residue which is covalently linked to another amino acid residue of the sequence
  MISC_FEATURE (18)..(18): Xaa is leucine, isoleucine, valine, phenylalanine, methionine, or an amino acid residue which is covalently linked to another amino acid residue of the sequence
XXXXAEDXXXXXXXXXXXMVGGVVIAT

SEQ ID NO: 717 - protein, 26 aa, Artificial Sequence
  synthetic
  MISC_FEATURE (1)..(1): Xaa is valine, leucine, isoleucine, alanine, methionine, or an amino acid residue which is covalently linked to another amino acid residue of the sequence
  MISC_FEATURE (2)..(2): Xaa is phenylalanine, tyrosine, valine, leucine, isoleucine, methionine, or an amino acid residue which is covalently linked to another amino acid residue of the sequence
  MISC_FEATURE (3)..(3): Xaa is phenylalanine, tyrosine, valine, leucine, isoleucine, methionine, or an amino acid residue which is covalently linked to another amino acid residue of the sequence
  MISC_FEATURE (7)..(7): Xaa is valine, leucine, isoleucine, alanine, methionine, or an amino acid residue which is covalently linked to another amino acid residue of the sequence
  MISC_FEATURE (8)..(8): Xaa is glycine, alanine, serine, or an amino acid residue which is covalently linked to another amino acid residue of the sequence
  MISC_FEATURE (9)..(9): Xaa is serine, glycine, alanine, threonine, or an amino acid residue which is covalently linked to another amino acid residue of the sequence
  MISC_FEATURE (10)..(10): Xaa is asparagine, glutamine, methionine, or an amino acid residue which is covalently linked to another amino acid residue of the sequence
  MISC_FEATURE (11)..(11): Xaa is lysine, arginine, or an amino acid residue which is covalently linked to another amino acid residue of the sequence
  MISC_FEATURE (12)..(12): Xaa is glycine, alanine, serine, or an amino acid residue which is covalently linked to another amino acid residue of the sequence
  MISC_FEATURE (13)..(13): Xaa is alanine, valine, glycine, serine, or an amino acid residue which is covalently linked to another amino acid residue of the sequence
  MISC_FEATURE (14)..(14): Xaa is isoleucine, leucine, valine, phenylalanine, methionine, or an amino acid residue which is covalently linked to another amino acid residue of the sequence
  MISC_FEATURE (15)..(15): Xaa is isoleucine, leucine, valine, phenylalanine, methionine, or an amino acid residue which is covalently linked to another amino acid residue of the sequence
  MISC_FEATURE (16)..(16): Xaa is glycine, alanine, serine, or an amino acid residue which is covalently linked to another amino acid residue of the sequence
XXXAEDXXXXXXXXXXLMVGGVVIAT

SEQ ID NO: 718 - protein, 25 aa, Artificial Sequence
  synthetic
  MISC_FEATURE (1)..(1): Xaa is phenylalanine, tyrosine, valine, leucine, isoleucine, methionine, or an amino acid residue which is covalently linked to another amino acid residue of the sequence
  MISC_FEATURE (2)..(2): Xaa is phenylalanine, tyrosine, valine, leucine, isoleucine, methionine, or an amino acid residue which is covalently linked to another amino acid residue of the sequence
  MISC_FEATURE (6)..(6): Xaa is valine, leucine, isoleucine, alanine, methionine, or an amino acid residue which is covalently linked to another amino acid residue of the sequence
  MISC_FEATURE (7)..(7): Xaa is glycine, alanine, serine, or an amino acid residue which is covalently linked to another amino acid residue of the sequence
  MISC_FEATURE (8)..(8): Xaa is serine, glycine, alanine, threonine, or an amino acid residue which is covalently linked to another amino acid residue of the sequence
  MISC_FEATURE (9)..(9): Xaa is asparagine, glutamine, methionine, or an amino acid residue which is covalently linked to another amino acid residue of the sequence
  MISC_FEATURE (10)..(10): Xaa is lysine, arginine, or an amino acid residue which is covalently linked to another amino acid residue of the sequence
  MISC_FEATURE (11)..(11): Xaa is glycine, alanine, serine, or an amino acid residue which is covalently linked to another amino acid residue of the sequence
  MISC_FEATURE (12)..(12): Xaa is alanine, valine, glycine, serine, or an amino acid residue which is covalently linked to another amino acid residue of the sequence
  MISC_FEATURE (13)..(13): Xaa is isoleucine, leucine, valine, phenylalanine, methionine, or an amino acid residue which is covalently linked to another amino acid residue of the sequence
  MISC_FEATURE (14)..(14): Xaa is isoleucine, leucine, valine, phenylalanine, methionine, or an amino acid residue which is covalently linked to another amino acid residue of the sequence
XXAEDXXXXXXXXXGLMVGGVVIAT

SEQ ID NO: 719 - protein, 24 aa, Artificial Sequence
  synthetic
  MISC_FEATURE (1)..(1): Xaa is phenylalanine, tyrosine, valine, leucine, isoleucine, methionine, or an amino acid residue which is covalently linked to another amino acid residue of the sequence
  MISC_FEATURE (5)..(5): Xaa is valine, leucine, isoleucine, alanine, methionine, or an amino acid residue which is covalently linked to another amino acid residue of the sequence
  MISC_FEATURE (6)..(6): Xaa is glycine, alanine, serine, or an amino acid residue which is covalently linked to another amino acid residue of the sequence
  MISC_FEATURE (7)..(7): Xaa is serine, glycine, alanine, threonine, or an amino acid residue which is covalently linked to another amino acid residue of the sequence
  MISC_FEATURE (8)..(8): Xaa is asparagine, glutamine, methionine, or an amino acid residue which is covalently linked to another amino acid residue of the sequence
  MISC_FEATURE (9)..(9): Xaa is lysine, arginine, or an amino acid residue which is covalently linked to another amino acid residue of the sequence
  MISC_FEATURE (10)..(10): Xaa is glycine, alanine, serine, or an amino acid residue which is covalently linked to another amino acid residue of the sequence
  MISC_FEATURE (11)..(11): Xaa is alanine, valine, glycine, serine, or an amino acid residue which is covalently linked to another amino acid residue of the sequence
  MISC_FEATURE (12)..(12): Xaa is isoleucine, leucine, valine, phenylalanine, methionine, or an amino acid residue which is covalently linked to another amino acid residue of the sequence
  MISC_FEATURE (32)..(32): Xaa is isoleucine, leucine, valine, phenylalanine, methionine, or an amino acid residue which is covalently linked to another amino acid residue of the sequence
XAEDXXXXXXXXIGLMVGGVVIAT

SEQ ID NO: 720 - protein, 42 aa, Artificial Sequence
  synthetic
  MISC_FEATURE (12)..(12): Xaa is valine, leucine, isoleucine, alanine, methionine, or an amino acid residue which is covalently linked to another amino acid residue of the sequence
  MISC_FEATURE (13)..(13): Xaa is histidine, tyrosine, serine, methionine, or an amino acid residue which is covalently linked to another amino acid residue of the sequence
  MISC_FEATURE (14)..(14): Xaa is histidine, tyrosine, serine, methionine, or an amino acid residue which is covalently linked to another amino acid residue of the sequence
  MISC_FEATURE (15)..(15): Xaa is glutamine, asparagine, methionine, serine, or an amino acid which is covalently linked to another amino acid residue of the sequence
  MISC_FEATURE (16)..(16): Xaa is lysine, arginine, or an amino acid residue which is covalently linked to another amino acid residue of the sequence
  MISC_FEATURE (17)..(17): Xaa is leucine, isoleucine, valine, phenylalanine, methionine, or an amino acid residue which is covalently linked to another amino acid residue of the sequence
  MISC_FEATURE (18)..(18): Xaa is valine, leucine, isoleucine, alanine, methionine, or an amino acid residue which is covalently linked to another amino acid residue of the sequence
  MISC_FEATURE (19)..(19): Xaa is phenylalanine, tyrosine, valine, leucine, isoleucine, methionine, or an amino acid residue which is covalently linked to another amino acid residue of the sequence
  MISC_FEATURE (20)..(20): Xaa is phenylalanine, tyrosine, valine, leucine, isoleucine, methionine, or an amino acid residue which is covalently linked to another amino acid residue of the sequence
  MISC_FEATURE (24)..(24): Xaa is valine, leucine, isoleucine, alanine, methionine, or an amino acid residue which is covalently linked to another amino acid residue of the sequence
  MISC_FEATURE (25)..(25): Xaa is glycine, alanine, serine, or an amino acid residue which is covalently linked to another amino acid residue of the sequence
  MISC_FEATURE (26)..(26): Xaa is serine, glycine, alanine, threonine, or an amino acid residue which is covalently linked to another amino acid residue of the sequence
  MISC_FEATURE (27)..(27): Xaa is asparagine, glutamine, methionine, or an amino acid residue which is covalently linked to another amino acid residue of the sequence
  MISC_FEATURE (28)..(28): Xaa is lysine, arginine, or an amino acid residue which is covalently linked to another amino acid residue of the sequence
  MISC_FEATURE (29)..(29): Xaa is glycine, alanine, serine, or an amino acid residue which is covalently linked to another amino acid residue of the sequence
  MISC_FEATURE (30)..(30): Xaa is alanine, valine, glycine, serine, or an amino acid residue which is covalently linked to another amino acid residue of the sequence
  MISC_FEATURE (31)..(31): Xaa is isoleucine, leucine, valine, phenylalanine, methionine, or an amino acid residue which is covalently linked to another amino acid residue of the sequence
  MISC_FEATURE (32)..(32): Xaa is isoleucine, leucine, valine, phenylalanine, methionine, or an amino acid residue which is covalently linked to another amino acid residue of the sequence
  MISC_FEATURE (33)..(33): Xaa is glycine, alanine, serine, or an amino acid residue which is covalently linked to another amino acid residue of the sequence
  MISC_FEATURE (34)..(34): Xaa is leucine, isoleucine, valine, phenylalanine, methionine, or an amino acid residue which is covalently linked to another amino acid residue of the sequence
  MISC_FEATURE (35)..(35): Xaa is methionine, valine, leucine, isoleucine, alanine, or an amino acid residue which is covalently linked to another amino acid residue of the sequence
  MISC_FEATURE (36)..(36): Xaa is valine, leucine, isoleucine, alanine, methionine, or an amino acid residue which is covalently linked to another amino acid residue of the sequence
  MISC_FEATURE (37)..(37): Xaa is glycine, alanine, serine, or an amino acid residue which is covalently linked to another amino acid residue of the sequence
  MISC_FEATURE (38)..(38): Xaa is glycine, alanine, serine, or an amino acid residue which is covalently linked to another amino acid residue of the sequence
  MISC_FEATURE (39)..(39): Xaa is valine, leucine, isoleucine, alanine, methionine, or an amino acid residue which is covalently linked to another amino acid residue of the sequence
DAEFRHDSGYEXXXXXXXXXAEDXXXXXXXXXXXXXXXXVIA

SEQ ID NO: 721 - protein, 41 aa, Artificial Sequence
  synthetic
  MISC_FEATURE (11)..(11): Xaa is valine, leucine, isoleucine, alanine, methionine, or an amino acid residue which is covalently linked to another amino acid residue of the sequence
  MISC_FEATURE (12)..(12): Xaa is histidine, tyrosine, serine, methionine, or an amino acid residue which is covalently linked to another amino acid residue of the sequence
  MISC_FEATURE (13)..(13): Xaa is histidine, tyrosine, serine, methionine, or an amino acid residue which is covalently linked to another amino acid residue of the sequence
  MISC_FEATURE (14)..(14): Xaa is glutamine, asparagine, methionine, serine, or an amino acid which is covalently linked to another amino acid residue of the sequence
  MISC_FEATURE (15)..(15): Xaa is lysine, arginine, or an amino acid residue which is covalently linked to another amino acid residue of the sequence
  MISC_FEATURE (16)..(16): Xaa is leucine, isoleucine, valine, phenylalanine, methionine, or an amino acid residue which is covalently linked to another amino acid residue of the sequence
  MISC_FEATURE (17)..(17): Xaa is valine, leucine, isoleucine, alanine, methionine, or an amino acid residue which is covalently linked to another amino acid residue of the sequence
  MISC_FEATURE (18)..(18): Xaa is phenylalanine, tyrosine, valine, leucine, isoleucine, methionine, or an amino acid residue which is covalently linked to another amino acid residue of the sequence
  MISC_FEATURE (19)..(19): Xaa is phenylalanine, tyrosine, valine, leucine, isoleucine, methionine, or an amino acid residue which is covalently linked to another amino acid residue of the sequence
  MISC_FEATURE (23)..(23): Xaa is valine, leucine, isoleucine, alanine, methionine, or an amino acid residue which is covalently linked to another amino acid residue of the sequence
  MISC_FEATURE (24)..(24): Xaa is glycine, alanine, serine, or an amino acid residue which is covalently linked to another amino acid residue of the sequence
  MISC_FEATURE (25)..(25): Xaa is serine, glycine, alanine, threonine, or an amino acid residue which is covalently linked to another amino acid residue of the sequence
  MISC_FEATURE (26)..(26): Xaa is asparagine, glutamine, methionine, or an amino acid residue which is covalently linked to another amino acid residue of the sequence
  MISC_FEATURE (27)..(27): Xaa is lysine, arginine, or an amino acid residue which is covalently linked to another amino acid residue of the sequence
  MISC_FEATURE (28)..(28): Xaa is glycine, alanine, serine, or an amino acid residue which is covalently linked to another amino acid residue of the sequence
  MISC_FEATURE (29)..(29): Xaa is alanine, valine, glycine, serine, or an amino acid residue which is covalently linked to another amino acid residue of the sequence
  MISC_FEATURE (30)..(30): Xaa is isoleucine, leucine, valine, phenylalanine, methionine, or an amino acid residue which is covalently linked to another amino acid residue of the sequence
  MISC_FEATURE (31)..(31): Xaa is isoleucine, leucine, valine, phenylalanine, methionine, or an amino acid residue which is covalently linked to another amino acid residue of the sequence
  MISC_FEATURE (32)..(32): Xaa is glycine, alanine, serine, or an amino acid residue which is covalently linked to another amino acid residue of the sequence
  MISC_FEATURE (33)..(33): Xaa is leucine, isoleucine, valine, phenylalanine, methionine, or an amino acid residue which is covalently linked to another amino acid residue of the sequence
  MISC_FEATURE (34)..(34): Xaa is methionine, valine, leucine, isoleucine, alanine, or an amino acid residue which is covalently linked to another amino acid residue of the sequence
  MISC_FEATURE (35)..(35): Xaa is valine, leucine, isoleucine, alanine, methionine, or an amino acid residue which is covalently linked to another amino acid residue of the sequence
  MISC_FEATURE (36)..(36): Xaa is glycine, alanine, serine, or an amino acid residue which is covalently linked to another amino acid residue of the sequence
  MISC_FEATURE (37)..(37): Xaa is glycine, alanine, serine, or an amino acid residue which is covalently linked to another amino acid residue of the sequence
  MISC_FEATURE (38)..(38): Xaa is valine, leucine, isoleucine, alanine, methionine, or an amino acid residue which is covalently linked to another amino acid residue of the sequence
AEFRHDSGYEXXXXXXXXXAEDXXXXXXXXXXXXXXXXVIA

SEQ ID NO: 722 - protein, 40 aa, Artificial Sequence
  synthetic
  MISC_FEATURE (10)..(10): Xaa is valine, leucine, isoleucine, alanine, methionine, or an amino acid residue which is covalently linked to another amino acid residue of the sequence
  MISC_FEATURE (11)..(11): Xaa is histidine, tyrosine, serine, methionine, or an amino acid residue which is covalently linked to another amino acid residue of the sequence
  MISC_FEATURE (12)..(12): Xaa is histidine, tyrosine, serine, methionine, or an amino acid residue which is covalently linked to another amino acid residue of the sequence
  MISC_FEATURE (13)..(13): Xaa is glutamine, asparagine, methionine, serine, or an amino acid which is covalently linked to another amino acid residue of the sequence
  MISC_FEATURE (14)..(14): Xaa is lysine, arginine, or an amino acid residue which is covalently linked to another amino acid residue of the sequence
  MISC_FEATURE (15)..(15): Xaa is leucine, isoleucine, valine, phenylalanine, methionine, or an amino acid residue which is covalently linked to another amino acid residue of the sequence
  MISC_FEATURE (16)..(16): Xaa is valine, leucine, isoleucine, alanine, methionine, or an amino acid residue which is covalently linked to another amino acid residue of the sequence
  MISC_FEATURE (17)..(17): Xaa is phenylalanine, tyrosine, valine, leucine, isoleucine, methionine, or an amino acid residue which is covalently linked to another amino acid residue of the sequence
  MISC_FEATURE (18)..(18): Xaa is phenylalanine, tyrosine, valine, leucine, isoleucine, methionine, or an amino acid residue which is covalently linked to another amino acid residue of the sequence
  MISC_FEATURE (22)..(22): Xaa is valine, leucine, isoleucine, alanine, methionine, or an amino acid residue which is covalently linked to another amino acid residue of the sequence
  MISC_FEATURE (23)..(23): Xaa is glycine, alanine, serine, or an amino acid residue which is covalently linked to another amino acid residue of the sequence
  MISC_FEATURE (24)..(24): Xaa is serine, glycine, alanine, threonine, or an amino acid residue which is covalently linked to another amino acid residue of the sequence
  MISC_FEATURE (25)..(25): Xaa is asparagine, glutamine, methionine, or an amino acid residue which is covalently linked to another amino acid residue of the sequence
  MISC_FEATURE (26)..(26): Xaa is lysine, arginine, or an amino acid residue which is covalently linked to another amino acid residue of the sequence
  MISC_FEATURE (27)..(27): Xaa is glycine, alanine, serine, or an amino acid residue which is covalently linked to another amino acid residue of the sequence
  MISC_FEATURE (28)..(28): Xaa is alanine, valine, glycine, serine, or an amino acid residue which is covalently linked to another amino acid residue of the sequence
  MISC_FEATURE (29)..(29): Xaa is isoleucine, leucine, valine, phenylalanine, methionine, or an amino acid residue which is covalently linked to another amino acid residue of the sequence
  MISC_FEATURE (30)..(30): Xaa is isoleucine, leucine, valine, phenylalanine, methionine, or an amino acid residue which is covalently linked to another amino acid residue of the sequence
  MISC_FEATURE (31)..(31): Xaa is glycine, alanine, serine, or an amino acid residue which is covalently linked to another amino acid residue of the sequence
  MISC_FEATURE (32)..(32): Xaa is leucine, isoleucine, valine, phenylalanine, methionine, or an amino acid residue which is covalently linked to another amino acid residue of the sequence
  MISC_FEATURE (33)..(33): Xaa is methionine, valine, leucine, isoleucine, alanine, or an amino acid residue which is covalently linked to another amino acid residue of the sequence
  MISC_FEATURE (34)..(34): Xaa is valine, leucine, isoleucine, alanine, methionine, or an amino acid residue which is covalently linked to another amino acid residue of the sequence
  MISC_FEATURE (35)..(35): Xaa is glycine, alanine, serine, or an amino acid residue which is covalently linked to another amino acid residue of the sequence
  MISC_FEATURE (36)..(36): Xaa is glycine, alanine, serine, or an amino acid residue which is covalently linked to another amino acid residue of the sequence
  MISC_FEATURE (37)..(37): Xaa is valine, leucine, isoleucine, alanine, methionine, or an amino acid residue which is covalently linked to another amino acid residue of the sequence
EFRHDSGYEXXXXXXXXXAEDXXXXXXXXXXXXXXXXVIA

SEQ ID NO: 723 - protein, 39 aa, Artificial Sequence
  synthetic
  MISC_FEATURE (9)..(9): Xaa is valine, leucine, isoleucine, alanine, methionine, or an amino acid residue which is covalently linked to another amino acid residue of the sequence
  MISC_FEATURE (10)..(10): Xaa is histidine, tyrosine, serine, methionine, or an amino acid residue which is covalently linked to another amino acid residue of the sequence
  MISC_FEATURE (11)..(11): Xaa is histidine, tyrosine, serine, methionine, or an amino acid residue which is covalently linked to another amino acid residue of the sequence
  MISC_FEATURE (12)..(12): Xaa is glutamine, asparagine, methionine, serine, or an amino acid which is covalently linked to another amino acid residue of the sequence
  MISC_FEATURE (13)..(13): Xaa is lysine, arginine, or an amino acid residue which is covalently linked to another amino acid residue of the sequence
  MISC_FEATURE (14)..(14): Xaa is leucine, isoleucine, valine, phenylalanine, methionine, or an amino acid residue which is covalently linked to another amino acid residue of the sequence
  MISC_FEATURE (15)..(15): Xaa is valine, leucine, isoleucine, alanine, methionine, or an amino acid residue which is covalently linked to another amino acid residue of the sequence
  MISC_FEATURE (16)..(16): Xaa is phenylalanine, tyrosine, valine, leucine, isoleucine, methionine, or an amino acid residue which is covalently linked to another amino acid residue of the sequence
  MISC_FEATURE (17)..(17): Xaa is phenylalanine, tyrosine, valine, leucine, isoleucine, methionine, or an amino acid residue which is covalently linked to another amino acid residue of the sequence
  MISC_FEATURE (21)..(21): Xaa is valine, leucine, isoleucine, alanine, methionine, or an amino acid residue which is covalently linked to another amino acid residue of the sequence
  MISC_FEATURE (22)..(22): Xaa is glycine, alanine, serine, or an amino acid residue which is covalently linked to another amino acid residue of the sequence
  MISC_FEATURE (23)..(23): Xaa is serine, glycine, alanine, threonine, or an amino acid residue which is covalently linked to another amino acid residue of the sequence
  MISC_FEATURE (24)..(24): Xaa is asparagine, glutamine, methionine, or an amino acid residue which is covalently linked to another amino acid residue of the sequence
  MISC_FEATURE (25)..(25): Xaa is lysine, arginine, or an amino acid residue which is covalently linked to another amino acid residue of the sequence
  MISC_FEATURE (26)..(26): Xaa is glycine, alanine, serine, or an amino acid residue which is covalently linked to another amino acid residue of the sequence
  MISC_FEATURE (27)..(27): Xaa is alanine, valine, glycine, serine, or an amino acid residue which is covalently linked to another amino acid residue of the sequence
  MISC_FEATURE (28)..(28): Xaa is isoleucine, leucine, valine, phenylalanine, methionine, or an amino acid residue which is covalently linked to another amino acid residue of the sequence
  MISC_FEATURE (29)..(29): Xaa is isoleucine, leucine, valine, phenylalanine, methionine, or an amino acid residue which is covalently linked to another amino acid residue of the sequence
  MISC_FEATURE (30)..(30): Xaa is glycine, alanine, serine, or an amino acid residue which is covalently linked to another amino acid residue of the sequence
  MISC_FEATURE (31)..(31): Xaa is leucine, isoleucine, valine, phenylalanine, methionine, or an amino acid residue which is covalently linked to another amino acid residue of the sequence
  MISC_FEATURE (32)..(32): Xaa is methionine, valine, leucine, isoleucine, alanine, or an amino acid residue which is covalently linked to another amino acid residue of the sequence
  MISC_FEATURE (33)..(33): Xaa is valine, leucine, isoleucine, alanine, methionine, or an amino acid residue which is covalently linked to another amino acid residue of the sequence
  MISC_FEATURE (34)..(34): Xaa is glycine, alanine, serine, or an amino acid residue which is covalently linked to another amino acid residue of the sequence
  MISC_FEATURE (35)..(35): Xaa is glycine, alanine, serine, or an amino acid residue which is covalently linked to another amino acid residue of the sequence
  MISC_FEATURE (36)..(36): Xaa is valine, leucine, isoleucine, alanine, methionine, or an amino acid residue which is covalently linked to another amino acid residue of the sequence
FRHDSGYEXXXXXXXXXAEDXXXXXXXXXXXXXXXXVIA

SEQ ID NO: 724 - protein, 38 aa, Artificial Sequence
  synthetic
  MISC_FEATURE (8)..(8): Xaa is valine, leucine, isoleucine, alanine, methionine, or an amino acid residue which is covalently linked to another amino acid residue of the sequence
  MISC_FEATURE (9)..(9): Xaa is histidine, tyrosine, serine, methionine, or an amino acid residue which is covalently linked to another amino acid residue of the sequence
  MISC_FEATURE (10)..(10): Xaa is histidine, tyrosine, serine, methionine, or an amino acid residue which is covalently linked to another amino acid residue of the sequence
  MISC_FEATURE (11)..(11): Xaa is glutamine, asparagine, methionine, serine, or an amino acid which is covalently linked to another amino acid residue of the sequence
  MISC_FEATURE (12)..(12): Xaa is lysine, arginine, or an amino acid residue which is covalently linked to another amino acid residue of the sequence
  MISC_FEATURE (13)..(13): Xaa is leucine, isoleucine, valine, phenylalanine, methionine, or an amino acid residue which is covalently linked to another amino acid residue of the sequence
  MISC_FEATURE (14)..(14): Xaa is valine, leucine, isoleucine, alanine, methionine, or an amino acid residue which is covalently linked to another amino acid residue of the sequence
  MISC_FEATURE (15)..(15): Xaa is phenylalanine, tyrosine, valine, leucine, isoleucine, methionine, or an amino acid residue which is covalently linked to another amino acid residue of the sequence
  MISC_FEATURE (16)..(16): Xaa is phenylalanine, tyrosine, valine, leucine, isoleucine, methionine, or an amino acid residue which is covalently linked to another amino acid residue of the sequence
  MISC_FEATURE (20)..(20): Xaa is valine, leucine, isoleucine, alanine, methionine, or an amino acid residue which is covalently linked to another amino acid residue of the sequence
  MISC_FEATURE (21)..(21): Xaa is glycine, alanine, serine, or an amino acid residue which is covalently linked to another amino acid residue of the sequence
  MISC_FEATURE (22)..(22): Xaa is serine, glycine, alanine, threonine, or an amino acid residue which is covalently linked to another amino acid residue of the sequence
  MISC_FEATURE (23)..(23): Xaa is asparagine, glutamine, methionine, or an amino acid residue which is covalently linked to another amino acid residue of the sequence
  MISC_FEATURE (24)..(24): Xaa is lysine, arginine, or an amino acid residue which is covalently linked to another amino acid residue of the sequence
  MISC_FEATURE (25)..(25): Xaa is glycine, alanine, serine, or an amino acid residue which is covalently linked to another amino acid residue of the sequence
  MISC_FEATURE (26)..(26): Xaa is alanine, valine, glycine, serine, or an amino acid residue which is covalently linked to another amino acid residue of the sequence
  MISC_FEATURE (27)..(27): Xaa is isoleucine, leucine, valine, phenylalanine, methionine, or an amino acid residue which is covalently linked to another amino acid residue of the sequence
  MISC_FEATURE (28)..(28): Xaa is isoleucine, leucine, valine, phenylalanine, methionine, or an amino acid residue which is covalently linked to another amino acid residue of the sequence
  MISC_FEATURE (29)..(29): Xaa is glycine, alanine, serine, or an amino acid residue which is covalently linked to another amino acid residue of the sequence
  MISC_FEATURE (30)..(30): Xaa is leucine, isoleucine, valine, phenylalanine, methionine, or an amino acid residue which is covalently linked to another amino acid residue of the sequence
  MISC_FEATURE (31)..(31): Xaa is methionine, valine, leucine, isoleucine, alanine, or an amino acid residue which is covalently linked to another amino acid residue of the sequence
  MISC_FEATURE (32)..(32): Xaa is valine, leucine, isoleucine, alanine, methionine, or an amino acid residue which is covalently linked to another amino acid residue of the sequence
  MISC_FEATURE (33)..(33): Xaa is glycine, alanine, serine, or an amino acid residue which is covalently linked to another amino acid residue of the sequence
  MISC_FEATURE (34)..(34): Xaa is glycine, alanine, serine, or an amino acid residue which is covalently linked to another amino acid residue of the sequence
  MISC_FEATURE (35)..(35): Xaa is valine, leucine, isoleucine, alanine, methionine, or an amino acid residue which is covalently linked to another amino acid residue of the sequence
RHDSGYEXXXXXXXXXAEDXXXXXXXXXXXXXXXXVIA

SEQ ID NO: 725 - protein, 37 aa, Artificial Sequence
  synthetic
  MISC_FEATURE (7)..(7): Xaa is valine, leucine, isoleucine, alanine, methionine, or an amino acid residue which is covalently linked to another amino acid residue of the sequence
  MISC_FEATURE (8)..(8): Xaa is histidine, tyrosine, serine, methionine, or an amino acid residue which is covalently linked to another amino acid residue of the sequence
  MISC_FEATURE (9)..(9): Xaa is histidine, tyrosine, serine, methionine, or an amino acid residue which is covalently linked to another amino acid residue of the sequence
  MISC_FEATURE (10)..(10): Xaa is glutamine, asparagine, methionine, serine, or an amino acid which is covalently linked to another amino acid residue of the sequence
  MISC_FEATURE (11)..(11): Xaa is lysine, arginine, or an amino acid residue which is covalently linked to another amino acid residue of the sequence
  MISC_FEATURE (12)..(12): Xaa is leucine, isoleucine, valine, phenylalanine, methionine, or an amino acid residue which is covalently linked to another amino acid residue of the sequence
  MISC_FEATURE (13)..(13): Xaa is valine, leucine, isoleucine, alanine, methionine, or an amino acid residue which is covalently linked to another amino acid residue of the sequence
  MISC_FEATURE (14)..(14): Xaa is phenylalanine, tyrosine, valine, leucine, isoleucine, methionine, or an amino acid residue which is covalently linked to another amino acid residue of the sequence
  MISC_FEATURE (15)..(15): Xaa is phenylalanine, tyrosine, valine, leucine, isoleucine, methionine, or an amino acid residue which is covalently linked to another amino acid residue of the sequence
  MISC_FEATURE (19)..(19): Xaa is valine, leucine, isoleucine, alanine, methionine, or an amino acid residue which is covalently linked to another amino acid residue of the sequence
  MISC_FEATURE (20)..(20): Xaa is glycine, alanine, serine, or an amino acid residue which is covalently linked to another amino acid residue of the sequence
  MISC_FEATURE (21)..(21): Xaa is serine, glycine, alanine, threonine, or an amino acid residue which is covalently linked to another amino acid residue of the sequence
  MISC_FEATURE (22)..(22): Xaa is asparagine, glutamine, methionine, or an amino acid residue which is covalently linked to another amino acid residue of the sequence
  MISC_FEATURE (23)..(23): Xaa is lysine, arginine, or an amino acid residue which is covalently linked to another amino acid residue of the sequence
  MISC_FEATURE (24)..(24): Xaa is glycine, alanine, serine, or an amino acid residue which is covalently linked to another amino acid residue of the sequence
  MISC_FEATURE (25)..(25): Xaa is alanine, valine, glycine, serine, or an amino acid residue which is covalently linked to another amino acid residue of the sequence
  MISC_FEATURE (26)..(26): Xaa is isoleucine, leucine, valine, phenylalanine, methionine, or an amino acid residue which is covalently linked to another amino acid residue of the sequence
  MISC_FEATURE (27)..(27): Xaa is isoleucine, leucine, valine, phenylalanine, methionine, or an amino acid residue which is covalently linked to another amino acid residue of the sequence
  MISC_FEATURE (28)..(28): Xaa is glycine, alanine, serine, or an amino acid residue which is covalently linked to another amino acid residue of the sequence
  MISC_FEATURE (29)..(29): Xaa is leucine, isoleucine, valine, phenylalanine, methionine, or an amino acid residue which is covalently linked to another amino acid residue of the sequence
  MISC_FEATURE (30)..(30): Xaa is methionine, valine, leucine, isoleucine, alanine, or an amino acid residue which is covalently linked to another amino acid residue of the sequence
  MISC_FEATURE (31)..(31): Xaa is valine, leucine, isoleucine, alanine, methionine, or an amino acid residue which is covalently linked to another amino acid residue of the sequence
  MISC_FEATURE (32)..(32): Xaa is glycine, alanine, serine, or an amino acid residue which is covalently linked to another amino acid residue of the sequence
  MISC_FEATURE (33)..(33): Xaa is glycine, alanine, serine, or an amino acid residue which is covalently linked to another amino acid residue of the sequence
  MISC_FEATURE (34)..(34): Xaa is valine, leucine, isoleucine, alanine, methionine, or an amino acid residue which is covalently linked to another amino acid residue of the sequence
HDSGYEXXXXXXXXXAEDXXXXXXXXXXXXXXXXVIA

SEQ ID NO: 726 - protein, 36 aa, Artificial Sequence
  synthetic
  MISC_FEATURE (6)..(6): Xaa is valine, leucine, isoleucine, alanine, methionine, or an amino acid residue which is covalently linked to another amino acid residue of the sequence
  MISC_FEATURE (7)..(7): Xaa is histidine, tyrosine, serine, methionine, or an amino acid residue which is covalently linked to another amino acid residue of the sequence
  MISC_FEATURE (8)..(8): Xaa is histidine, tyrosine, serine, methionine, or an amino acid residue which is covalently linked to another amino acid residue of the sequence
  MISC_FEATURE (9)..(9): Xaa is glutamine, asparagine, methionine, serine, or an amino acid which is covalently linked to another amino acid residue of the sequence
  MISC_FEATURE (10)..(10): Xaa is lysine, arginine, or an amino acid residue which is covalently linked to another amino acid residue of the sequence
  MISC_FEATURE (11)..(11): Xaa is leucine, isoleucine, valine, phenylalanine, methionine, or an amino acid residue which is covalently linked to another amino acid residue of the sequence
  MISC_FEATURE (12)..(12): Xaa is valine, leucine, isoleucine, alanine, methionine, or an amino acid residue which is covalently linked to another amino acid residue of the sequence
  MISC_FEATURE (13)..(13): Xaa is phenylalanine, tyrosine, valine, leucine, isoleucine, methionine, or an amino acid residue which is covalently linked to another amino acid residue of the sequence
  MISC_FEATURE (14)..(14): Xaa is phenylalanine, tyrosine, valine, leucine, isoleucine, methionine, or an amino acid residue which is covalently linked to another amino acid residue of the sequence
  MISC_FEATURE (18)..(18): Xaa is valine, leucine, isoleucine, alanine, methionine, or an amino acid residue which is covalently linked to another amino acid residue of the sequence
  MISC_FEATURE (19)..(19): Xaa is glycine, alanine, serine, or an amino acid residue which is covalently linked to another amino acid residue of the sequence
  MISC_FEATURE (20)..(20): Xaa is serine, glycine, alanine, threonine, or an amino acid residue which is covalently linked to another amino acid residue of the sequence
  MISC_FEATURE (21)..(21): Xaa is asparagine, glutamine, methionine, or an amino acid residue which is covalently linked to another amino acid residue of the sequence
  MISC_FEATURE (22)..(22): Xaa is lysine, arginine, or an amino acid residue which is covalently linked to another amino acid residue of the sequence
  MISC_FEATURE (23)..(23): Xaa is glycine, alanine, serine, or an amino acid residue which is covalently linked to another amino acid residue of the sequence
  MISC_FEATURE (24)..(24): Xaa is alanine, valine, glycine, serine, or an amino acid residue which is covalently linked to another amino acid residue of the sequence
  MISC_FEATURE (25)..(25): Xaa is isoleucine, leucine, valine, phenylalanine, methionine, or an amino acid residue which is covalently linked to another amino acid residue of the sequence
  MISC_FEATURE (26)..(26): Xaa is isoleucine, leucine, valine, phenylalanine, methionine, or an amino acid residue which is covalently linked to another amino acid residue of the sequence
  MISC_FEATURE (27)..(27): Xaa is glycine, alanine, serine, or an amino acid residue which is covalently linked to another amino acid residue of the sequence
  MISC_FEATURE (28)..(28): Xaa is leucine, isoleucine, valine, phenylalanine, methionine, or an amino acid residue which is covalently linked to another amino acid residue of the sequence
  MISC_FEATURE (29)..(29): Xaa is methionine, valine, leucine, isoleucine, alanine, or an amino acid residue which is covalently linked to another amino acid residue of the sequence
  MISC_FEATURE (30)..(30): Xaa is valine, leucine, isoleucine, alanine, methionine, or an amino acid residue which is covalently linked to another amino acid residue of the sequence
  MISC_FEATURE (31)..(31): Xaa is glycine, alanine, serine, or an amino acid residue which is covalently linked to another amino acid residue of the sequence
  MISC_FEATURE (32)..(32): Xaa is glycine, alanine, serine, or an amino acid residue which is covalently linked to another amino acid residue of the sequence
  MISC_FEATURE (33)..(33): Xaa is valine, leucine, isoleucine, alanine, methionine, or an amino acid residue which is covalently linked to another amino acid residue of the sequence
DSGYEXXXXXXXXXAEDXXXXXXXXXXXXXXXXVIA

SEQ ID NO: 727 - protein, 35 aa, Artificial Sequence
  synthetic
  MISC_FEATURE (5)..(5): Xaa is valine, leucine, isoleucine, alanine, methionine, or an amino acid residue which is covalently linked to another amino acid residue of the sequence
  MISC_FEATURE (6)..(6): Xaa is histidine, tyrosine, serine, methionine, or an amino acid residue which is covalently linked to another amino acid residue of the sequence
  MISC_FEATURE (7)..(7): Xaa is histidine, tyrosine, serine, methionine, or an amino acid residue which is covalently linked to another amino acid residue of the sequence
  MISC_FEATURE (8)..(8): Xaa is glutamine, asparagine, methionine, serine, or an amino acid which is covalently linked to another amino acid residue of the sequence
  MISC_FEATURE (9)..(9): Xaa is lysine, arginine, or an amino acid residue which is covalently linked to another amino acid residue of the sequence
  MISC_FEATURE (10)..(10): Xaa is leucine, isoleucine, valine, phenylalanine, methionine, or an amino acid residue which is covalently linked to another amino acid residue of the sequence
  MISC_FEATURE (11)..(11): Xaa is valine, leucine, isoleucine, alanine, methionine, or an amino acid residue which is covalently linked to another amino acid residue of the sequence
  MISC_FEATURE (12)..(12): Xaa is phenylalanine, tyrosine, valine, leucine, isoleucine, methionine, or an amino acid residue which is covalently linked to another amino acid residue of the sequence
  MISC_FEATURE (13)..(13): Xaa is phenylalanine, tyrosine, valine, leucine, isoleucine, methionine, or an amino acid residue which is covalently linked to another amino acid residue of the sequence
  MISC_FEATURE (17)..(17): Xaa is valine, leucine, isoleucine, alanine, methionine, or an amino acid residue which is covalently linked to another amino acid residue of the sequence
  MISC_FEATURE (18)..(18): Xaa is glycine, alanine, serine, or an amino acid residue which is covalently linked to another amino acid residue of the sequence
  MISC_FEATURE (19)..(19): Xaa is serine, glycine, alanine, threonine, or an amino acid residue which is covalently linked to another amino acid residue of the sequence
  MISC_FEATURE (20)..(20): Xaa is asparagine, glutamine, methionine, or an amino acid residue which is covalently linked to another amino acid residue of the sequence
  MISC_FEATURE (21)..(21): Xaa is lysine, arginine, or an amino acid residue which is covalently linked to another amino acid residue of the sequence
  MISC_FEATURE (22)..(22): Xaa is glycine, alanine, serine, or an amino acid residue which is covalently linked to another amino acid residue of the sequence
  MISC_FEATURE (23)..(23): Xaa is alanine, valine, glycine, serine, or an amino acid residue which is covalently linked to another amino acid residue of the sequence
  MISC_FEATURE (24)..(24): Xaa is isoleucine, leucine, valine, phenylalanine, methionine, or an amino acid residue which is covalently linked to another amino acid residue of the sequence
  MISC_FEATURE (25)..(25): Xaa is isoleucine, leucine, valine, phenylalanine, methionine, or an amino acid residue which is covalently linked to another amino acid residue of the sequence
  MISC_FEATURE (26)..(26): Xaa is glycine, alanine, serine, or an amino acid residue which is covalently linked to another amino acid residue of the sequence
  MISC_FEATURE (27)..(27): Xaa is leucine, isoleucine, valine, phenylalanine, methionine, or an amino acid residue which is covalently linked to another amino acid residue of the sequence
  MISC_FEATURE (28)..(28): Xaa is methionine, valine, leucine, isoleucine, alanine, or an amino acid residue which is covalently linked to another amino acid residue of the sequence
  MISC_FEATURE (29)..(29): Xaa is valine, leucine, isoleucine, alanine, methionine, or an amino acid residue which is covalently linked to another amino acid residue of the sequence
  MISC_FEATURE (30)..(30): Xaa is glycine, alanine, serine, or an amino acid residue which is covalently linked to another amino acid residue of the sequence
  MISC_FEATURE (31)..(31): Xaa is glycine, alanine, serine, or an amino acid residue which is covalently linked to another amino acid residue of the sequence
  MISC_FEATURE (32)..(32): Xaa is valine, leucine, isoleucine, alanine, methionine, or an amino acid residue which is covalently linked to another amino acid residue of the sequence
SGYEXXXXXXXXXAEDXXXXXXXXXXXXXXXXVIA

SEQ ID NO: 728 - protein, 34 aa, Artificial Sequence
  synthetic
  MISC_FEATURE (4)..(4): Xaa is valine, leucine, isoleucine, alanine, methionine, or an amino acid residue which is covalently linked to another amino acid residue of the sequence
  MISC_FEATURE (5)..(5): Xaa is histidine, tyrosine, serine, methionine, or an amino acid residue which is covalently linked to another amino acid residue of the sequence
  MISC_FEATURE (6)..(6): Xaa is histidine, tyrosine, serine, methionine, or an amino acid residue which is covalently linked to another amino acid residue of the sequence
  MISC_FEATURE (7)..(7): Xaa is glutamine, asparagine, methionine, serine, or an amino acid which is covalently linked to another amino acid residue of the sequence
  MISC_FEATURE (8)..(8): Xaa is lysine, arginine, or an amino acid residue which is covalently linked to another amino acid residue of the sequence
  MISC_FEATURE (9)..(9): Xaa is leucine, isoleucine, valine, phenylalanine, methionine, or an amino acid residue which is covalently linked to another amino acid residue of the sequence
  MISC_FEATURE (10)..(10): Xaa is valine, leucine, isoleucine, alanine, methionine, or an amino acid residue which is covalently linked to another amino acid residue of the sequence
  MISC_FEATURE (11)..(11): Xaa is phenylalanine, tyrosine, valine, leucine, isoleucine, methionine, or an amino acid residue which is covalently linked to another amino acid residue of the sequence
  MISC_FEATURE (12)..(12): Xaa is phenylalanine, tyrosine, valine, leucine, isoleucine, methionine, or an amino acid residue which is covalently linked to another amino acid residue of the sequence
  MISC_FEATURE (16)..(16): Xaa is valine, leucine, isoleucine, alanine, methionine, or an amino acid residue which is covalently linked to another amino acid residue of the sequence
  MISC_FEATURE (17)..(17): Xaa is glycine, alanine, serine, or an amino acid residue which is covalently linked to another amino acid residue of the sequence
  MISC_FEATURE (18)..(18): Xaa is serine, glycine, alanine, threonine, or an amino acid residue which is covalently linked to another amino acid residue of the sequence
  MISC_FEATURE (19)..(19): Xaa is asparagine, glutamine, methionine, or an amino acid residue which is covalently linked to another amino acid residue of the sequence
  MISC_FEATURE (20)..(20): Xaa is lysine, arginine, or an amino acid residue which is covalently linked to another amino acid residue of the sequence
  MISC_FEATURE (21)..(21): Xaa is glycine, alanine, serine, or an amino acid residue which is covalently linked to another amino acid residue of the sequence
  MISC_FEATURE (22)..(22): Xaa is alanine, valine, glycine, serine, or an amino acid residue which is covalently linked to another amino acid residue of the sequence
  MISC_FEATURE (23)..(23): Xaa is isoleucine, leucine, valine, phenylalanine, methionine, or an amino acid residue which is covalently linked to another amino acid residue of the sequence
  MISC_FEATURE (24)..(24): Xaa is isoleucine, leucine, valine, phenylalanine, methionine, or an amino acid residue which is covalently linked to another amino acid residue of the sequence
  MISC_FEATURE (25)..(25): Xaa is glycine, alanine, serine, or an amino acid residue which is covalently linked to another amino acid residue of the sequence
  MISC_FEATURE (26)..(26): Xaa is leucine, isoleucine, valine, phenylalanine, methionine, or an amino acid residue which is covalently linked to another amino acid residue of the sequence
  MISC_FEATURE (27)..(27): Xaa is methionine, valine, leucine, isoleucine, alanine, or an amino acid residue which is covalently linked to another amino acid residue of the sequence
  MISC_FEATURE (28)..(28): Xaa is valine, leucine, isoleucine, alanine, methionine, or an amino acid residue which is covalently linked to another amino acid residue of the sequence
  MISC_FEATURE (29)..(29): Xaa is glycine, alanine, serine, or an amino acid residue which is covalently linked to another amino acid residue of the sequence
  MISC_FEATURE (30)..(30): Xaa is glycine, alanine, serine, or an amino acid residue which is covalently linked to another amino acid residue of the sequence
  MISC_FEATURE (31)..(31): Xaa is valine, leucine, isoleucine, alanine, methionine, or an amino acid residue which is covalently linked to another amino acid residue of the sequence
GYEXXXXXXXXXAEDXXXXXXXXXXXXXXXXVIA

SEQ ID NO: 729 - protein, 33 aa, Artificial Sequence
  synthetic
  MISC_FEATURE (3)..(3): Xaa is valine, leucine, isoleucine, alanine, methionine, or an amino acid residue which is covalently linked to another amino acid residue of the sequence
  MISC_FEATURE (4)..(4): Xaa is histidine, tyrosine, serine, methionine, or an amino acid residue which is covalently linked to another amino acid residue of the sequence
  MISC_FEATURE (5)..(5): Xaa is histidine, tyrosine, serine, methionine, or an amino acid residue which is covalently linked to another amino acid residue of the sequence
  MISC_FEATURE (6)..(6): Xaa is glutamine, asparagine, methionine, serine, or an amino acid which is covalently linked to another amino acid residue of the sequence
  MISC_FEATURE (7)..(7): Xaa is lysine, arginine, or an amino acid residue which is covalently linked to another amino acid residue of the sequence
  MISC_FEATURE (8)..(8): Xaa is leucine, isoleucine, valine, phenylalanine, methionine, or an amino acid residue which is covalently linked to another amino acid residue of the sequence
  MISC_FEATURE (9)..(9): Xaa is valine, leucine, isoleucine, alanine, methionine, or an amino acid residue which is covalently linked to another amino acid residue of the sequence
  MISC_FEATURE (10)..(10): Xaa is phenylalanine, tyrosine, valine, leucine, isoleucine, methionine, or an amino acid residue which is covalently linked to another amino acid residue of the sequence
  MISC_FEATURE (11)..(11): Xaa is phenylalanine, tyrosine, valine, leucine, isoleucine, methionine, or an amino acid residue which is covalently linked to another amino acid residue of the sequence
  MISC_FEATURE (15)..(15): Xaa is valine, leucine, isoleucine, alanine, methionine, or an amino acid residue which is covalently linked to another amino acid residue of the sequence
  MISC_FEATURE (16)..(16): Xaa is glycine, alanine, serine, or an amino acid residue which is covalently linked to another amino acid residue of the sequence
  MISC_FEATURE (17)..(17): Xaa is serine, glycine, alanine, threonine, or an amino acid residue which is covalently linked to another amino acid residue of the sequence
  MISC_FEATURE (18)..(18): Xaa is asparagine, glutamine, methionine, or an amino acid residue which is covalently linked to another amino acid residue of the sequence
  MISC_FEATURE (19)..(19): Xaa is lysine, arginine, or an amino acid residue which is covalently linked to another amino acid residue of the sequence
  MISC_FEATURE (20)..(20): Xaa is glycine, alanine, serine, or an amino acid residue which is covalently linked to another amino acid residue of the sequence
  MISC_FEATURE (21)..(21): Xaa is alanine, valine, glycine, serine, or an amino acid residue which is covalently linked to another amino acid residue of the sequence
  MISC_FEATURE (22)..(22): Xaa is isoleucine, leucine, valine, phenylalanine, methionine, or an amino acid residue which is covalently linked to another amino acid residue of the sequence
  MISC_FEATURE (23)..(23): Xaa is isoleucine, leucine, valine, phenylalanine, methionine, or an amino acid residue which is covalently linked to another amino acid residue of the sequence
  MISC_FEATURE (24)..(24): Xaa is glycine, alanine, serine, or an amino acid residue which is covalently linked to another amino acid residue of the sequence
  MISC_FEATURE (25)..(25): Xaa is leucine, isoleucine, valine, phenylalanine, methionine, or an amino acid residue which is covalently linked to another amino acid residue of the sequence
  MISC_FEATURE (26)..(26): Xaa is methionine, valine, leucine, isoleucine, alanine, or an amino acid residue which is covalently linked to another amino acid residue of the sequence
  MISC_FEATURE (27)..(27): Xaa is valine, leucine, isoleucine, alanine, methionine, or an amino acid residue which is covalently linked to another amino acid residue of the sequence
  MISC_FEATURE (28)..(28): Xaa is glycine, alanine, serine, or an amino acid residue which is covalently linked to another amino acid residue of the sequence
  MISC_FEATURE (29)..(29): Xaa is glycine, alanine, serine, or an amino acid residue which is covalently linked to another amino acid residue of the sequence
  MISC_FEATURE (30)..(30): Xaa is valine, leucine, isoleucine, alanine, methionine, or an amino acid residue which is covalently linked to another amino acid residue of the sequence
YEXXXXXXXXXAEDXXXXXXXXXXXXXXXXVIA

SEQ ID NO: 730 - protein, 32 aa, Artificial Sequence
  synthetic
  MISC_FEATURE (2)..(2): Xaa is valine, leucine, isoleucine, alanine, methionine, or an amino acid residue which is covalently linked to another amino acid residue of the sequence
  MISC_FEATURE (3)..(3): Xaa is histidine, tyrosine, serine, methionine, or an amino acid residue which is covalently linked to another amino acid residue of the sequence
  MISC_FEATURE (4)..(4): Xaa is histidine, tyrosine, serine, methionine, or an amino acid residue which is covalently linked to another amino acid residue of the sequence
  MISC_FEATURE (5)..(5): Xaa is glutamine, asparagine, methionine, serine, or an amino acid which is covalently linked to another amino acid residue of the sequence
  MISC_FEATURE (6)..(6): Xaa is lysine, arginine, or an amino acid residue which is covalently linked to another amino acid residue of the sequence
  MISC_FEATURE (7)..(7): Xaa is leucine, isoleucine, valine, phenylalanine, methionine, or an amino acid residue which is covalently linked to another amino acid residue of the sequence
  MISC_FEATURE (8)..(8): Xaa is valine, leucine, isoleucine, alanine, methionine, or an amino acid residue which is covalently linked to another amino acid residue of the sequence
  MISC_FEATURE (9)..(9): Xaa is phenylalanine, tyrosine, valine, leucine, isoleucine, methionine, or an amino acid residue which is covalently linked to another amino acid residue of the sequence
  MISC_FEATURE (10)..(10): Xaa is phenylalanine, tyrosine, valine, leucine, isoleucine, methionine, or an amino acid residue which is covalently linked to another amino acid residue of the sequence
  MISC_FEATURE (14)..(14): Xaa is valine, leucine, isoleucine, alanine, methionine, or an amino acid residue which is covalently linked to another amino acid residue of the sequence
  MISC_FEATURE (15)..(15): Xaa is glycine, alanine, serine, or an amino acid residue which is covalently linked to another amino acid residue of the sequence
  MISC_FEATURE (16)..(16): Xaa is serine, glycine, alanine, threonine, or an amino acid residue which is covalently linked to another amino acid residue of the sequence
  MISC_FEATURE (17)..(17): Xaa is asparagine, glutamine, methionine, or an amino acid residue which is covalently linked to another amino acid residue of the sequence
  MISC_FEATURE (18)..(18): Xaa is lysine, arginine, or an amino acid residue which is covalently linked to another amino acid residue of the sequence
  MISC_FEATURE (19)..(19): Xaa is glycine, alanine, serine, or an amino acid residue which is covalently linked to another amino acid residue of the sequence
  MISC_FEATURE (20)..(20): Xaa is alanine, valine, glycine, serine, or an amino acid residue which is covalently linked to another amino acid residue of the sequence
  MISC_FEATURE (21)..(21): Xaa is isoleucine, leucine, valine, phenylalanine, methionine, or an amino acid residue which is covalently linked to another amino acid residue of the sequence
  MISC_FEATURE (22)..(22): Xaa is isoleucine, leucine, valine, phenylalanine, methionine, or an amino acid residue which is covalently linked to another amino acid residue of the sequence
  MISC_FEATURE (23)..(23): Xaa is glycine, alanine, serine, or an amino acid residue which is covalently linked to another amino acid residue of the sequence
  MISC_FEATURE (24)..(24): Xaa is leucine, isoleucine, valine, phenylalanine, methionine, or an amino acid residue which is covalently linked to another amino acid residue of the sequence
  MISC_FEATURE (25)..(25): Xaa is methionine, valine, leucine, isoleucine, alanine, or an amino acid residue which is covalently linked to another amino acid residue of the sequence
  MISC_FEATURE (26)..(26): Xaa is valine, leucine, isoleucine, alanine, methionine, or an amino acid residue which is covalently linked to another amino acid residue of the sequence
  MISC_FEATURE (27)..(27): Xaa is glycine, alanine, serine, or an amino acid residue which is covalently linked to another amino acid residue of the sequence
  MISC_FEATURE (28)..(28): Xaa is glycine, alanine, serine, or an amino acid residue which is covalently linked to another amino acid residue of the sequence
  MISC_FEATURE (29)..(29): Xaa is valine, leucine, isoleucine, alanine, methionine, or an amino acid residue which is covalently linked to another amino acid residue of the sequence
EXXXXXXXXXAEDXXXXXXXXXXXXXXXXVIA

SEQ ID NO: 731 - protein, 31 aa, Artificial Sequence
  synthetic
  MISC_FEATURE (1)..(1): Xaa is valine, leucine, isoleucine, alanine, methionine, or an amino acid residue which is covalently linked to another amino acid residue of the sequence
  MISC_FEATURE (2)..(2): Xaa is histidine, tyrosine, serine, methionine, or an amino acid residue which is covalently linked to another amino acid residue of the sequence
  MISC_FEATURE (3)..(3): Xaa is histidine, tyrosine, serine, methionine, or an amino acid residue which is covalently linked to another amino acid residue of the sequence
  MISC_FEATURE (4)..(4): Xaa is glutamine, asparagine, methionine, serine, or an amino acid which is covalently linked to another amino acid residue of the sequence
  MISC_FEATURE (5)..(5): Xaa is lysine, arginine, or an amino acid residue which is covalently linked to another amino acid residue of the sequence
  MISC_FEATURE (6)..(6): Xaa is leucine, isoleucine, valine, phenylalanine, methionine, or an amino acid residue which is covalently linked to another amino acid residue of the sequence
  MISC_FEATURE (7)..(7): Xaa is valine, leucine, isoleucine, alanine, methionine, or an amino acid residue which is covalently linked to another amino acid residue of the sequence
  MISC_FEATURE (8)..(8): Xaa is phenylalanine, tyrosine, valine, leucine, isoleucine, methionine, or an amino acid residue which is covalently linked to another amino acid residue of the sequence
  MISC_FEATURE (9)..(9): Xaa is phenylalanine, tyrosine, valine, leucine, isoleucine, methionine, or an amino acid residue which is covalently linked to another amino acid residue of the sequence
  MISC_FEATURE (13)..(13): Xaa is valine, leucine, isoleucine, alanine, methionine, or an amino acid residue which is covalently linked to another amino acid residue of the sequence
  MISC_FEATURE (14)..(14): Xaa is glycine, alanine, serine, or an amino acid residue which is covalently linked to another amino acid residue of the sequence
  MISC_FEATURE (15)..(15): Xaa is serine, glycine, alanine, threonine, or an amino acid residue which is covalently linked to another amino acid residue of the sequence
  MISC_FEATURE (16)..(16): Xaa is asparagine, glutamine, methionine, or an amino acid residue which is covalently linked to another amino acid residue of the sequence
  MISC_FEATURE (17)..(17): Xaa is lysine, arginine, or an amino acid residue which is covalently linked to another amino acid residue of the sequence
  MISC_FEATURE (18)..(18): Xaa is glycine, alanine, serine, or an amino acid residue which is covalently linked to another amino acid residue of the sequence
  MISC_FEATURE (19)..(19): Xaa is alanine, valine, glycine, serine, or an amino acid residue which is covalently linked to another amino acid residue of the sequence
  MISC_FEATURE (20)..(20): Xaa is isoleucine, leucine, valine, phenylalanine, methionine, or an amino acid residue which is covalently linked to another amino acid residue of the sequence
  MISC_FEATURE (21)..(21): Xaa is isoleucine, leucine, valine, phenylalanine, methionine, or an amino acid residue which is covalently linked to another amino acid residue of the sequence
  MISC_FEATURE (22)..(22): Xaa is glycine, alanine, serine, or an amino acid residue which is covalently linked to another amino acid residue of the sequence
  MISC_FEATURE (23)..(23): Xaa is leucine, isoleucine, valine, phenylalanine, methionine, or an amino acid residue which is covalently linked to another amino acid residue of the sequence
  MISC_FEATURE (24)..(24): Xaa is methionine, valine, leucine, isoleucine, alanine, or an amino acid residue which is covalently linked to another amino acid residue of the sequence
  MISC_FEATURE (25)..(25): Xaa is valine, leucine, isoleucine, alanine, methionine, or an amino acid residue which is covalently linked to another amino acid residue of the sequence
  MISC_FEATURE (26)..(26): Xaa is glycine, alanine, serine, or an amino acid residue which is covalently linked to another amino acid residue of the sequence
  MISC_FEATURE (27)..(27): Xaa is glycine, alanine, serine, or an amino acid residue which is covalently linked to another amino acid residue of the sequence
  MISC_FEATURE (28)..(28): Xaa is valine, leucine, isoleucine, alanine, methionine, or an amino acid residue which is covalently linked to another amino acid residue of the sequence
XXXXXXXXXAEDXXXXXXXXXXXXXXXXVIA

SEQ ID NO: 732 - protein, 30 aa, Artificial Sequence
  synthetic
  MISC_FEATURE (1)..(1): Xaa is histidine, tyrosine, serine, methionine, or an amino acid residue which is covalently linked to another amino acid residue of the sequence
  MISC_FEATURE (2)..(2): Xaa is histidine, tyrosine, serine, methionine, or an amino acid residue which is covalently linked to another amino acid residue of the sequence
  MISC_FEATURE (3)..(3): Xaa is glutamine, asparagine, methionine, serine, or an amino acid which is covalently linked to another amino acid residue of the sequence
  MISC_FEATURE (4)..(4): Xaa is lysine, arginine, or an amino acid residue which is covalently linked to another amino acid residue of the sequence
  MISC_FEATURE (5)..(5): Xaa is leucine, isoleucine, valine, phenylalanine, methionine, or an amino acid residue which is covalently linked to another amino acid residue of the sequence
  MISC_FEATURE (6)..(6): Xaa is valine, leucine, isoleucine, alanine, methionine, or an amino acid residue which is covalently linked to another amino acid residue of the sequence
  MISC_FEATURE (7)..(7): Xaa is phenylalanine, tyrosine, valine, leucine, isoleucine, methionine, or an amino acid residue which is covalently linked to another amino acid residue of the sequence
  MISC_FEATURE (8)..(8): Xaa is phenylalanine, tyrosine, valine, leucine, isoleucine, methionine, or an amino acid residue which is covalently linked to another amino acid residue of the sequence
  MISC_FEATURE (12)..(12): Xaa is valine, leucine, isoleucine, alanine, methionine, or an amino acid residue which is covalently linked to another amino acid residue of the sequence
  MISC_FEATURE (13)..(13): Xaa is glycine, alanine, serine, or an amino acid residue which is covalently linked to another amino acid residue of the sequence
  MISC_FEATURE (14)..(14): Xaa is serine, glycine, alanine, threonine, or an amino acid residue which is covalently linked to another amino acid residue of the sequence
  MISC_FEATURE (15)..(15): Xaa is asparagine, glutamine, methionine, or an amino acid residue which is covalently linked to another amino acid residue of the sequence
  MISC_FEATURE (16)..(16): Xaa is lysine, arginine, or an amino acid residue which is covalently linked to another amino acid residue of the sequence
  MISC_FEATURE (17)..(17): Xaa is glycine, alanine, serine, or an amino acid residue which is covalently linked to another amino acid residue of the sequence
  MISC_FEATURE (18)..(18): Xaa is alanine, valine, glycine, serine, or an amino acid residue which is covalently linked to another amino acid residue of the sequence
  MISC_FEATURE (19)..(19): Xaa is isoleucine, leucine, valine, phenylalanine, methionine, or an amino acid residue which is covalently linked to another amino acid residue of the sequence
  MISC_FEATURE (20)..(20): Xaa is isoleucine, leucine, valine, phenylalanine, methionine, or an amino acid residue which is covalently linked to another amino acid residue of the sequence
  MISC_FEATURE (21)..(21): Xaa is glycine, alanine, serine, or an amino acid residue which is covalently linked to another amino acid residue of the sequence
  MISC_FEATURE (22)..(22): Xaa is leucine, isoleucine, valine, phenylalanine, methionine, or an amino acid residue which is covalently linked to another amino acid residue of the sequence
  MISC_FEATURE (23)..(23): Xaa is methionine, valine, leucine, isoleucine, alanine, or an amino acid residue which is covalently linked to another amino acid residue of the sequence
  MISC_FEATURE (24)..(24): Xaa is valine, leucine, isoleucine, alanine, methionine, or an amino acid residue which is covalently linked to another amino acid residue of the sequence
  MISC_FEATURE (25)..(25): Xaa is glycine, alanine, serine, or an amino acid residue which is covalently linked to another amino acid residue of the sequence
  MISC_FEATURE (26)..(26): Xaa is glycine, alanine, serine, or an amino acid residue which is covalently linked to another amino acid residue of the sequence
XXXXXXXXAEDXXXXXXXXXXXXXXXVVIA

SEQ ID NO: 733 - protein, 29 aa, Artificial Sequence
  synthetic
  MISC_FEATURE (1)..(1): Xaa is histidine, tyrosine, serine, methionine, or an amino acid residue which is covalently linked to another amino acid residue of the sequence
  MISC_FEATURE (2)..(2): Xaa is glutamine, asparagine, methionine, serine, or an amino acid which is covalently linked to another amino acid residue of the sequence
  MISC_FEATURE (3)..(3): Xaa is lysine, arginine, or an amino acid residue which is covalently linked to another amino acid residue of the sequence
  MISC_FEATURE (4)..(4): Xaa is leucine, isoleucine, valine, phenylalanine, methionine, or an amino acid residue which is covalently linked to another amino acid residue of the sequence
  MISC_FEATURE (5)..(5): Xaa is valine, leucine, isoleucine, alanine, methionine, or an amino acid residue which is covalently linked to another amino acid residue of the sequence
  MISC_FEATURE (6)..(6): Xaa is phenylalanine, tyrosine, valine, leucine, isoleucine, methionine, or an amino acid residue which is covalently linked to another amino acid residue of the sequence
  MISC_FEATURE (7)..(7): Xaa is phenylalanine, tyrosine, valine, leucine, isoleucine, methionine, or an amino acid residue which is covalently linked to another amino acid residue of the sequence
  MISC_FEATURE (11)..(11): Xaa is valine, leucine, isoleucine, alanine, methionine, or an amino acid residue which is covalently linked to another amino acid residue of the sequence
  MISC_FEATURE (12)..(12): Xaa is glycine, alanine, serine, or an amino acid residue which is covalently linked to another amino acid residue of the sequence
  MISC_FEATURE (13)..(13): Xaa is serine, glycine, alanine, threonine, or an amino acid residue which is covalently linked to another amino acid residue of the sequence
  MISC_FEATURE (14)..(14): Xaa is asparagine, glutamine, methionine, or an amino acid residue which is covalently linked to another amino acid residue of the sequence
  MISC_FEATURE (15)..(15): Xaa is lysine, arginine, or an amino acid residue which is covalently linked to another amino acid residue of the sequence
  MISC_FEATURE (16)..(16): Xaa is glycine, alanine, serine, or an amino acid residue which is covalently linked to another amino acid residue of the sequence
  MISC_FEATURE (17)..(17): Xaa is alanine, valine, glycine, serine, or an amino acid residue which is covalently linked to another amino acid residue of the sequence
  MISC_FEATURE (18)..(18): Xaa is isoleucine, leucine, valine, phenylalanine, methionine, or an amino acid residue which is covalently linked to another amino acid residue of the sequence
  MISC_FEATURE (19)..(19): Xaa is isoleucine, leucine, valine, phenylalanine, methionine, or an amino acid residue which is covalently linked to another amino acid residue of the sequence
  MISC_FEATURE (20)..(20): Xaa is glycine, alanine, serine, or an amino acid residue which is covalently linked to another amino acid residue of the sequence
  MISC_FEATURE (21)..(21): Xaa is leucine, isoleucine, valine, phenylalanine, methionine, or an amino acid residue which is covalently linked to another amino acid residue of the sequence
  MISC_FEATURE (22)..(22): Xaa is methionine, valine, leucine, isoleucine, alanine, or an amino acid residue which is covalently linked to another amino acid residue of the sequence
  MISC_FEATURE (23)..(23): Xaa is valine, leucine, isoleucine, alanine, methionine, or an amino acid residue which is covalently linked to another amino acid residue of the sequence
  MISC_FEATURE (24)..(24): Xaa is glycine, alanine, serine, or an amino acid residue which is covalently linked to another amino acid residue of the sequence
XXXXXXXAEDXXXXXXXXXXXXXXGVVIA

SEQ ID NO: 734 - protein, 28 aa, Artificial Sequence
  synthetic
  MISC_FEATURE (1)..(1): Xaa is glutamine, asparagine, methionine, serine, or an amino acid which is covalently linked to another amino acid residue of the sequence
  MISC_FEATURE (2)..(2): Xaa is lysine, arginine, or an amino acid residue which is covalently linked to another amino acid residue of the sequence
  MISC_FEATURE (3)..(3): Xaa is leucine, isoleucine, valine, phenylalanine, methionine, or an amino acid residue which is covalently linked to another amino acid residue of the sequence
  MISC_FEATURE (4)..(4): Xaa is valine, leucine, isoleucine, alanine, methionine, or an amino acid residue which is covalently linked to another amino acid residue of the sequence
  MISC_FEATURE (5)..(5): Xaa is phenylalanine, tyrosine, valine, leucine, isoleucine, methionine, or an amino acid residue which is covalently linked to another amino acid residue of the sequence
  MISC_FEATURE (6)..(6): Xaa is phenylalanine, tyrosine, valine, leucine, isoleucine, methionine, or an amino acid residue which is covalently linked to another amino acid residue of the sequence
  MISC_FEATURE (10)..(10): Xaa is valine, leucine, isoleucine, alanine, methionine, or an amino acid residue which is covalently linked to another amino acid residue of the sequence
  MISC_FEATURE (11)..(11): Xaa is glycine, alanine, serine, or an amino acid residue which is covalently linked to another amino acid residue of the sequence
  MISC_FEATURE (12)..(12): Xaa is serine, glycine, alanine, threonine, or an amino acid residue which is covalently linked to another amino acid residue of the sequence
  MISC_FEATURE (13)..(13): Xaa is asparagine, glutamine, methionine, or an amino acid residue which is covalently linked to another amino acid residue of the sequence
  MISC_FEATURE (14)..(14): Xaa is lysine, arginine, or an amino acid residue which is covalently linked to another amino acid residue of the sequence
  MISC_FEATURE (15)..(15): Xaa is glycine, alanine, serine, or an amino acid residue which is covalently linked to another amino acid residue of the sequence
  MISC_FEATURE (16)..(16): Xaa is alanine, valine, glycine, serine, or an amino acid residue which is covalently linked to another amino acid residue of the sequence
  MISC_FEATURE (17)..(17): Xaa is isoleucine, leucine, valine, phenylalanine, methionine, or an amino acid residue which is covalently linked to another amino acid residue of the sequence
  MISC_FEATURE (18)..(18): Xaa is isoleucine, leucine, valine, phenylalanine, methionine, or an amino acid residue which is covalently linked to another amino acid residue of the sequence
  MISC_FEATURE (19)..(19): Xaa is glycine, alanine, serine, or an amino acid residue which is covalently linked to another amino acid residue of the sequence
  MISC_FEATURE (20)..(20): Xaa is leucine, isoleucine, valine, phenylalanine, methionine, or an amino acid residue which is covalently linked to another amino acid residue of the sequence
  MISC_FEATURE (21)..(21): Xaa is methionine, valine, leucine, isoleucine, alanine, or an amino acid residue which is covalently linked to another amino acid residue of the sequence
  MISC_FEATURE (22)..(22): Xaa is valine, leucine, isoleucine, alanine, methionine, or an amino acid residue which is covalently linked to another amino acid residue of the sequence
XXXXXXAEDXXXXXXXXXXXXXGGVVIA

SEQ ID NO: 735 - protein, 27 aa, Artificial Sequence
  synthetic
  MISC_FEATURE (1)..(1): Xaa is lysine, arginine, or an amino acid residue which is covalently linked to another amino acid residue of the sequence
  MISC_FEATURE (2)..(2): Xaa is leucine, isoleucine, valine, phenylalanine, methionine, or an amino acid residue which is covalently linked to another amino acid residue of the sequence
  MISC_FEATURE (3)..(3): Xaa is valine, leucine, isoleucine, alanine, methionine, or an amino acid residue which is covalently linked to another amino acid residue of the sequence
  MISC_FEATURE (4)..(4): Xaa is phenylalanine, tyrosine, valine, leucine, isoleucine, methionine, or an amino acid residue which is covalently linked to another amino acid residue of the sequence
  MISC_FEATURE (5)..(5): Xaa is phenylalanine, tyrosine, valine, leucine, isoleucine, methionine, or an amino acid residue which is covalently linked to another amino acid residue of the sequence
  MISC_FEATURE (9)..(9): Xaa is valine, leucine, isoleucine, alanine, methionine, or an amino acid residue which is covalently linked to another amino acid residue of the sequence
  MISC_FEATURE (10)..(10): Xaa is glycine, alanine, serine, or an amino acid residue which is covalently linked to another amino acid residue of the sequence
  MISC_FEATURE (11)..(11): Xaa is serine, glycine, alanine, threonine, or an amino acid residue which is covalently linked to another amino acid residue of the sequence
  MISC_FEATURE (12)..(12): Xaa is asparagine, glutamine, methionine, or an amino acid residue which is covalently linked to another amino acid residue of the sequence
  MISC_FEATURE (13)..(13): Xaa is lysine, arginine, or an amino acid residue which is covalently linked to another amino acid residue of the sequence
  MISC_FEATURE (14)..(14): Xaa is glycine, alanine, serine, or an amino acid residue which is covalently linked to another amino acid residue of the sequence
  MISC_FEATURE (15)..(15): Xaa is alanine, valine, glycine, serine, or an amino acid residue which is covalently linked to another amino acid residue of the sequence
  MISC_FEATURE (16)..(16): Xaa is isoleucine, leucine, valine, phenylalanine, methionine, or an amino acid residue which is covalently linked to another amino acid residue of the sequence
  MISC_FEATURE (17)..(17): Xaa is isoleucine, leucine, valine, phenylalanine, methionine, or an amino acid residue which is covalently linked to another amino acid residue of the sequence
  MISC_FEATURE (18)..(18): Xaa is glycine, alanine, serine, or an amino acid residue which is covalently linked to another amino acid residue of the sequence
  MISC_FEATURE (19)..(19): Xaa is leucine, isoleucine, valine, phenylalanine, methionine, or an amino acid residue which is covalently linked to another amino acid residue of the sequence
  MISC_FEATURE (20)..(20): Xaa is methionine, valine, leucine, isoleucine, alanine, or an amino acid residue which is covalently linked to another amino acid residue of the sequence
XXXXXAEDXXXXXXXXXXXXVGGVVIA

SEQ ID NO: 736 - protein, 26 aa, Artificial Sequence
  synthetic
  MISC_FEATURE (1)..(1): Xaa is leucine, isoleucine, valine, phenylalanine, methionine, or an amino acid residue which is covalently linked to another amino acid residue of the sequence
  MISC_FEATURE (2)..(2): Xaa is valine, leucine, isoleucine, alanine, methionine, or an amino acid residue which is covalently linked to another amino acid residue of the sequence
  MISC_FEATURE (3)..(3): Xaa is phenylalanine, tyrosine, valine, leucine, isoleucine, methionine, or an amino acid residue which is covalently linked to another amino acid residue of the sequence
  MISC_FEATURE (4)..(4): Xaa is phenylalanine, tyrosine, valine, leucine, isoleucine, methionine, or an amino acid residue which is covalently linked to another amino acid residue of the sequence
  MISC_FEATURE (8)..(8): Xaa is valine, leucine, isoleucine, alanine, methionine, or an amino acid residue which is covalently linked to another amino acid residue of the sequence
  MISC_FEATURE (9)..(9): Xaa is glycine, alanine, serine, or an amino acid residue which is covalently linked to another amino acid residue of the sequence
  MISC_FEATURE (10)..(10): Xaa is serine, glycine, alanine, threonine, or an amino acid residue which is covalently linked to another amino acid residue of the sequence
  MISC_FEATURE (11)..(11): Xaa is asparagine, glutamine, methionine, or an amino acid residue which is covalently linked to another amino acid residue of the sequence
  MISC_FEATURE (12)..(12): Xaa is lysine, arginine, or an amino acid residue which is covalently linked to another amino acid residue of the sequence
  MISC_FEATURE (13)..(13): Xaa is glycine, alanine, serine, or an amino acid residue which is covalently linked to another amino acid residue of the sequence
  MISC_FEATURE (14)..(14): Xaa is alanine, valine, glycine, serine, or an amino acid residue which is covalently linked to another amino acid residue of the sequence
  MISC_FEATURE (15)..(15): Xaa is isoleucine, leucine, valine, phenylalanine, methionine, or an amino acid residue which is covalently linked to another amino acid residue of the sequence
  MISC_FEATURE (16)..(16): Xaa is isoleucine, leucine, valine, phenylalanine, methionine, or an amino acid residue which is covalently linked to another amino acid residue of the sequence
  MISC_FEATURE (17)..(17): Xaa is glycine, alanine, serine, or an amino acid residue which is covalently linked to another amino acid residue of the sequence
  MISC_FEATURE (18)..(18): Xaa is leucine, isoleucine, valine, phenylalanine, methionine, or an amino acid residue which is covalently linked to another amino acid residue of the sequence
XXXXAEDXXXXXXXXXXXMVGGVVIA

SEQ ID NO: 737 - protein, 25 aa, Artificial Sequence
  synthetic
  MISC_FEATURE (1)..(1): Xaa is valine, leucine, isoleucine, alanine, methionine, or an amino acid residue which is covalently linked to another amino acid residue of the sequence
  MISC_FEATURE (2)..(2): Xaa is phenylalanine, tyrosine, valine, leucine, isoleucine, methionine, or an amino acid residue which is covalently linked to another amino acid residue of the sequence
  MISC_FEATURE (3)..(3): Xaa is phenylalanine, tyrosine, valine, leucine, isoleucine, methionine, or an amino acid residue which is covalently linked to another amino acid residue of the sequence
  MISC_FEATURE (7)..(7): Xaa is valine, leucine, isoleucine, alanine, methionine, or an amino acid residue which is covalently linked to another amino acid residue of the sequence
  MISC_FEATURE (8)..(8): Xaa is glycine, alanine, serine, or an amino acid residue which is covalently linked to another amino acid residue of the sequence
  MISC_FEATURE (9)..(9): Xaa is serine, glycine, alanine, threonine, or an amino acid residue which is covalently linked to another amino acid residue of the sequence
  MISC_FEATURE (10)..(10): Xaa is asparagine, glutamine, methionine, or an amino acid residue which is covalently linked to another amino acid residue of the sequence
  MISC_FEATURE (11)..(11): Xaa is lysine, arginine, or an amino acid residue which is covalently linked to another amino acid residue of the sequence
  MISC_FEATURE (12)..(12): Xaa is glycine, alanine, serine, or an amino acid residue which is covalently linked to another amino acid residue of the sequence
  MISC_FEATURE (13)..(13): Xaa is alanine, valine, glycine, serine, or an amino acid residue which is covalently linked to another amino acid residue of the sequence
  MISC_FEATURE (14)..(14): Xaa is isoleucine, leucine, valine, phenylalanine, methionine, or an amino acid residue which is covalently linked to another amino acid residue of the sequence
  MISC_FEATURE (15)..(15): Xaa is isoleucine, leucine, valine, phenylalanine, methionine, or an amino acid residue which is covalently linked to another amino acid residue of the sequence
  MISC_FEATURE (16)..(16): Xaa is glycine, alanine, serine, or an amino acid residue which is covalently linked to another amino acid residue of the sequence
XXXAEDXXXXXXXXXXLMVGGVVIA

SEQ ID NO: 738 - protein, 24 aa, Artificial Sequence
  synthetic
  MISC_FEATURE (1)..(1): Xaa is phenylalanine, tyrosine, valine, leucine, isoleucine, methionine, or an amino acid residue which is covalently linked to another amino acid residue of the sequence
  MISC_FEATURE (2)..(2): Xaa is phenylalanine, tyrosine, valine, leucine, isoleucine, methionine, or an amino acid residue which is covalently linked to another amino acid residue of the sequence
  MISC_FEATURE (6)..(6): Xaa is valine, leucine, isoleucine, alanine, methionine, or an amino acid residue which is covalently linked to another amino acid residue of the sequence
  MISC_FEATURE (7)..(7): Xaa is glycine, alanine, serine, or an amino acid residue which is covalently linked to another amino acid residue of the sequence
  MISC_FEATURE (8)..(8): Xaa is serine, glycine, alanine, threonine, or an amino acid residue which is covalently linked to another amino acid residue of the sequence
  MISC_FEATURE (9)..(9): Xaa is asparagine, glutamine, methionine, or an amino acid residue which is covalently linked to another amino acid residue of the sequence
  MISC_FEATURE (10)..(10): Xaa is lysine, arginine, or an amino acid residue which is covalently linked to another amino acid residue of the sequence
  MISC_FEATURE (11)..(11): Xaa is glycine, alanine, serine, or an amino acid residue which is covalently linked to another amino acid residue of the sequence
  MISC_FEATURE (12)..(12): Xaa is alanine, valine, glycine, serine, or an amino acid residue which is covalently linked to another amino acid residue of the sequence
  MISC_FEATURE (13)..(13): Xaa is isoleucine, leucine, valine, phenylalanine, methionine, or an amino acid residue which is covalently linked to another amino acid residue of the sequence
  MISC_FEATURE (14)..(14): Xaa is isoleucine, leucine, valine, phenylalanine, methionine, or an amino acid residue which is covalently linked to another amino acid residue of the sequence
XXAEDXXXXXXXXXGLMVGGVVIA

SEQ ID NO: 739 - protein, 23 aa, Artificial Sequence
  synthetic
  MISC_FEATURE (1)..(1): Xaa is phenylalanine, tyrosine, valine, leucine, isoleucine, methionine, or an amino acid residue which is covalently linked to another amino acid residue of the sequence
  MISC_FEATURE (5)..(5): Xaa is valine, leucine, isoleucine, alanine, methionine, or an amino acid residue which is covalently linked to another amino acid residue of the sequence
  MISC_FEATURE (6)..(6): Xaa is glycine, alanine, serine, or an amino acid residue which is covalently linked to another amino acid residue of the sequence
  MISC_FEATURE (7)..(7): Xaa is serine, glycine, alanine, threonine, or an amino acid residue which is covalently linked to another amino acid residue of the sequence
  MISC_FEATURE (8)..(8): Xaa is asparagine, glutamine, methionine, or an amino acid residue which is covalently linked to another amino acid residue of the sequence
  MISC_FEATURE (9)..(9): Xaa is lysine, arginine, or an amino acid residue which is covalently linked to another amino acid residue of the sequence
  MISC_FEATURE (10)..(10): Xaa is glycine, alanine, serine, or an amino acid residue which is covalently linked to another amino acid residue of the sequence
  MISC_FEATURE (11)..(11): Xaa is alanine, valine, glycine, serine, or an amino acid residue which is covalently linked to another amino acid residue of the sequence
  MISC_FEATURE (12)..(12): Xaa is isoleucine, leucine, valine, phenylalanine, methionine, or an amino acid residue which is covalently linked to another amino acid residue of the sequence
  MISC_FEATURE (32)..(32): Xaa is isoleucine, leucine, valine, phenylalanine, methionine, or an amino acid residue which is covalently linked to another amino acid residue of the sequence
XAEDXXXXXXXXIGLMVGGVVIA

SEQ ID NO: 740 - protein, 41 aa, Artificial Sequence
  synthetic
  MISC_FEATURE (12)..(12): Xaa is valine, leucine, isoleucine, alanine, methionine, or an amino acid residue which is covalently linked to another amino acid residue of the sequence
  MISC_FEATURE (13)..(13): Xaa is histidine, tyrosine, serine, methionine, or an amino acid residue which is covalently linked to another amino acid residue of the sequence
  MISC_FEATURE (14)..(14): Xaa is histidine, tyrosine, serine, methionine, or an amino acid residue which is covalently linked to another amino acid residue of the sequence
  MISC_FEATURE (15)..(15): Xaa is glutamine, asparagine, methionine, serine, or an amino acid which is covalently linked to another amino acid residue of the sequence
  MISC_FEATURE (16)..(16): Xaa is lysine, arginine, or an amino acid residue which is covalently linked to another amino acid residue of the sequence
  MISC_FEATURE (17)..(17): Xaa is leucine, isoleucine, valine, phenylalanine, methionine, or an amino acid residue which is covalently linked to another amino acid residue of the sequence
  MISC_FEATURE (18)..(18): Xaa is valine, leucine, isoleucine, alanine, methionine, or an amino acid residue which is covalently linked to another amino acid residue of the sequence
  MISC_FEATURE (19)..(19): Xaa is phenylalanine, tyrosine, valine, leucine, isoleucine, methionine, or an amino acid residue which is covalently linked to another amino acid residue of the sequence
  MISC_FEATURE (20)..(20): Xaa is phenylalanine, tyrosine, valine, leucine, isoleucine, methionine, or an amino acid residue which is covalently linked to another amino acid residue of the sequence
  MISC_FEATURE (24)..(24): Xaa is valine, leucine, isoleucine, alanine, methionine, or an amino acid residue which is covalently linked to another amino acid residue of the sequence
  MISC_FEATURE (25)..(25): Xaa is glycine, alanine, serine, or an amino acid residue which is covalently linked to another amino acid residue of the sequence
  MISC_FEATURE (26)..(26): Xaa is serine, glycine, alanine, threonine, or an amino acid residue which is covalently linked to another amino acid residue of the sequence
  MISC_FEATURE (27)..(27): Xaa is asparagine, glutamine, methionine, or an amino acid residue which is covalently linked to another amino acid residue of the sequence
  MISC_FEATURE (28)..(28): Xaa is lysine, arginine, or an amino acid residue which is covalently linked to another amino acid residue of the sequence
  MISC_FEATURE (29)..(29): Xaa is glycine, alanine, serine, or an amino acid residue which is covalently linked to another amino acid residue of the sequence
  MISC_FEATURE (30)..(30): Xaa is alanine, valine, glycine, serine, or an amino acid residue which is covalently linked to another amino acid residue of the sequence
  MISC_FEATURE (31)..(31): Xaa is isoleucine, leucine, valine, phenylalanine, methionine, or an amino acid residue which is covalently linked to another amino acid residue of the sequence
  MISC_FEATURE (32)..(32): Xaa is isoleucine, leucine, valine, phenylalanine, methionine, or an amino acid residue which is covalently linked to another amino acid residue of the sequence
  MISC_FEATURE (33)..(33): Xaa is glycine, alanine, serine, or an amino acid residue which is covalently linked to another amino acid residue of the sequence
  MISC_FEATURE (34)..(34): Xaa is leucine, isoleucine, valine, phenylalanine, methionine, or an amino acid residue which is covalently linked to another amino acid residue of the sequence
  MISC_FEATURE (35)..(35): Xaa is methionine, valine, leucine, isoleucine, alanine, or an amino acid residue which is covalently linked to another amino acid residue of the sequence
  MISC_FEATURE (36)..(36): Xaa is valine, leucine, isoleucine, alanine, methionine, or an amino acid residue which is covalently linked to another amino acid residue of the sequence
  MISC_FEATURE (37)..(37): Xaa is glycine, alanine, serine, or an amino acid residue which is covalently linked to another amino acid residue of the sequence
  MISC_FEATURE (38)..(38): Xaa is glycine, alanine, serine, or an amino acid residue which is covalently linked to another amino acid residue of the sequence
  MISC_FEATURE (39)..(39): Xaa is valine, leucine, isoleucine, alanine, methionine, or an amino acid residue which is covalently linked to another amino acid residue of the sequence
DAEFRHDSGYEXXXXXXXXXAEDXXXXXXXXXXXXXXXXVI

SEQ ID NO: 741 - protein, 40 aa, Artificial Sequence
  synthetic
  MISC_FEATURE (11)..(11): Xaa is valine, leucine, isoleucine, alanine, methionine, or an amino acid residue which is covalently linked to another amino acid residue of the sequence
  MISC_FEATURE (12)..(12): Xaa is histidine, tyrosine, serine, methionine, or an amino acid residue which is covalently linked to another amino acid residue of the sequence
  MISC_FEATURE (13)..(13): Xaa is histidine, tyrosine, serine, methionine, or an amino acid residue which is covalently linked to another amino acid residue of the sequence
  MISC_FEATURE (14)..(14): Xaa is glutamine, asparagine, methionine, serine, or an amino acid which is covalently linked to another amino acid residue of the sequence
  MISC_FEATURE (15)..(15): Xaa is lysine, arginine, or an amino acid residue which is covalently linked to another amino acid residue of the sequence
  MISC_FEATURE (16)..(16): Xaa is leucine, isoleucine, valine, phenylalanine, methionine, or an amino acid residue which is covalently linked to another amino acid residue of the sequence
  MISC_FEATURE (17)..(17): Xaa is valine, leucine, isoleucine, alanine, methionine, or an amino acid residue which is covalently linked to another amino acid residue of the sequence
  MISC_FEATURE (18)..(18): Xaa is phenylalanine, tyrosine, valine, leucine, isoleucine, methionine, or an amino acid residue which is covalently linked to another amino acid residue of the sequence
  MISC_FEATURE (19)..(19): Xaa is phenylalanine, tyrosine, valine, leucine, isoleucine, methionine, or an amino acid residue which is covalently linked to another amino acid residue of the sequence
  MISC_FEATURE (23)..(23): Xaa is valine, leucine, isoleucine, alanine, methionine, or an amino acid residue which is covalently linked to another amino acid residue of the sequence
  MISC_FEATURE (24)..(24): Xaa is glycine, alanine, serine, or an amino acid residue which is covalently linked to another amino acid residue of the sequence
  MISC_FEATURE (25)..(25): Xaa is serine, glycine, alanine, threonine, or an amino acid residue which is covalently linked to another amino acid residue of the sequence
  MISC_FEATURE (26)..(26): Xaa is asparagine, glutamine, methionine, or an amino acid residue which is covalently linked to another amino acid residue of the sequence
  MISC_FEATURE (27)..(27): Xaa is lysine, arginine, or an amino acid residue which is covalently linked to another amino acid residue of the sequence
  MISC_FEATURE (28)..(28): Xaa is glycine, alanine, serine, or an amino acid residue which is covalently linked to another amino acid residue of the sequence
  MISC_FEATURE (29)..(29): Xaa is alanine, valine, glycine, serine, or an amino acid residue which is covalently linked to another amino acid residue of the sequence
  MISC_FEATURE (30)..(30): Xaa is isoleucine, leucine, valine, phenylalanine, methionine, or an amino acid residue which is covalently linked to another amino acid residue of the sequence
  MISC_FEATURE (31)..(31): Xaa is isoleucine, leucine, valine, phenylalanine, methionine, or an amino acid residue which is covalently linked to another amino acid residue of the sequence
  MISC_FEATURE (32)..(32): Xaa is glycine, alanine, serine, or an amino acid residue which is covalently linked to another amino acid residue of the sequence
  MISC_FEATURE (33)..(33): Xaa is leucine, isoleucine, valine, phenylalanine, methionine, or an amino acid residue which is covalently linked to another amino acid residue of the sequence
  MISC_FEATURE (34)..(34): Xaa is methionine, valine, leucine, isoleucine, alanine, or an amino acid residue which is covalently linked to another amino acid residue of the sequence
  MISC_FEATURE (35)..(35): Xaa is valine, leucine, isoleucine, alanine, methionine, or an amino acid residue which is covalently linked to another amino acid residue of the sequence
  MISC_FEATURE (36)..(36): Xaa is glycine, alanine, serine, or an amino acid residue which is covalently linked to another amino acid residue of the sequence
  MISC_FEATURE (37)..(37): Xaa is glycine, alanine, serine, or an amino acid residue which is covalently linked to another amino acid residue of the sequence
  MISC_FEATURE (38)..(38): Xaa is valine, leucine, isoleucine, alanine, methionine, or an amino acid residue which is covalently linked to another amino acid residue of the sequence
AEFRHDSGYEXXXXXXXXXAEDXXXXXXXXXXXXXXXXVI

SEQ ID NO: 742 - protein, 39 aa, Artificial Sequence
  synthetic
  MISC_FEATURE (10)..(10): Xaa is valine, leucine, isoleucine, alanine, methionine, or an amino acid residue which is covalently linked to another amino acid residue of the sequence
  MISC_FEATURE (11)..(11): Xaa is histidine, tyrosine, serine, methionine, or an amino acid residue which is covalently linked to another amino acid residue of the sequence
  MISC_FEATURE (12)..(12): Xaa is histidine, tyrosine, serine, methionine, or an amino acid residue which is covalently linked to another amino acid residue of the sequence
  MISC_FEATURE (13)..(13): Xaa is glutamine, asparagine, methionine, serine, or an amino acid which is covalently linked to another amino acid residue of the sequence
  MISC_FEATURE (14)..(14): Xaa is lysine, arginine, or an amino acid residue which is covalently linked to another amino acid residue of the sequence
  MISC_FEATURE (15)..(15): Xaa is leucine, isoleucine, valine, phenylalanine, methionine, or an amino acid residue which is covalently linked to another amino acid residue of the sequence
  MISC_FEATURE (16)..(16): Xaa is valine, leucine, isoleucine, alanine, methionine, or an amino acid residue which is covalently linked to another amino acid residue of the sequence
  MISC_FEATURE (17)..(17): Xaa is phenylalanine, tyrosine, valine, leucine, isoleucine, methionine, or an amino acid residue which is covalently linked to another amino acid residue of the sequence
  MISC_FEATURE (18)..(18): Xaa is phenylalanine, tyrosine, valine, leucine, isoleucine, methionine, or an amino acid residue which is covalently linked to another amino acid residue of the sequence
  MISC_FEATURE (22)..(22): Xaa is valine, leucine, isoleucine, alanine, methionine, or an amino acid residue which is covalently linked to another amino acid residue of the sequence
  MISC_FEATURE (23)..(23): Xaa is glycine, alanine, serine, or an amino acid residue which is covalently linked to another amino acid residue of the sequence
  MISC_FEATURE (24)..(24): Xaa is serine, glycine, alanine, threonine, or an amino acid residue which is covalently linked to another amino acid residue of the sequence
  MISC_FEATURE (25)..(25): Xaa is asparagine, glutamine, methionine, or an amino acid residue which is covalently linked to another amino acid residue of the sequence
  MISC_FEATURE (26)..(26): Xaa is lysine, arginine, or an amino acid residue which is covalently linked to another amino acid residue of the sequence
  MISC_FEATURE (27)..(27): Xaa is glycine, alanine, serine, or an amino acid residue which is covalently linked to another amino acid residue of the sequence
  MISC_FEATURE (28)..(28): Xaa is alanine, valine, glycine, serine, or an amino acid residue which is covalently linked to another amino acid residue of the sequence
  MISC_FEATURE (29)..(29): Xaa is isoleucine, leucine, valine, phenylalanine, methionine, or an amino acid residue which is covalently linked to another amino acid residue of the sequence
  MISC_FEATURE (30)..(30): Xaa is isoleucine, leucine, valine, phenylalanine, methionine, or an amino acid residue which is covalently linked to another amino acid residue of the sequence
  MISC_FEATURE (31)..(31): Xaa is glycine, alanine, serine, or an amino acid residue which is covalently linked to another amino acid residue of the sequence
  MISC_FEATURE (32)..(32): Xaa is leucine, isoleucine, valine, phenylalanine, methionine, or an amino acid residue which is covalently linked to another amino acid residue of the sequence
  MISC_FEATURE (33)..(33): Xaa is methionine, valine, leucine, isoleucine, alanine, or an amino acid residue which is covalently linked to another amino acid residue of the sequence
  MISC_FEATURE (34)..(34): Xaa is valine, leucine, isoleucine, alanine, methionine, or an amino acid residue which is covalently linked to another amino acid residue of the sequence
  MISC_FEATURE (35)..(35): Xaa is glycine, alanine, serine, or an amino acid residue which is covalently linked to another amino acid residue of the sequence
  MISC_FEATURE (36)..(36): Xaa is glycine, alanine, serine, or an amino acid residue which is covalently linked to another amino acid residue of the sequence
  MISC_FEATURE (37)..(37): Xaa is valine, leucine, isoleucine, alanine, methionine, or an amino acid residue which is covalently linked to another amino acid residue of the sequence
EFRHDSGYEXXXXXXXXXAEDXXXXXXXXXXXXXXXXVI

SEQ ID NO: 743 - protein, 38 aa, Artificial Sequence
  synthetic
  MISC_FEATURE (9)..(9): Xaa is valine, leucine, isoleucine, alanine, methionine, or an amino acid residue which is covalently linked to another amino acid residue of the sequence
  MISC_FEATURE (10)..(10): Xaa is histidine, tyrosine, serine, methionine, or an amino acid residue which is covalently linked to another amino acid residue of the sequence
  MISC_FEATURE (11)..(11): Xaa is histidine, tyrosine, serine, methionine, or an amino acid residue which is covalently linked to another amino acid residue of the sequence
  MISC_FEATURE (12)..(12): Xaa is glutamine, asparagine, methionine, serine, or an amino acid which is covalently linked to another amino acid residue of the sequence
  MISC_FEATURE (13)..(13): Xaa is lysine, arginine, or an amino acid residue which is covalently linked to another amino acid residue of the sequence
  MISC_FEATURE (14)..(14): Xaa is leucine, isoleucine, valine, phenylalanine, methionine, or an amino acid residue which is covalently linked to another amino acid residue of the sequence
  MISC_FEATURE (15)..(15): Xaa is valine, leucine, isoleucine, alanine, methionine, or an amino acid residue which is covalently linked to another amino acid residue of the sequence
  MISC_FEATURE (16)..(16): Xaa is phenylalanine, tyrosine, valine, leucine, isoleucine, methionine, or an amino acid residue which is covalently linked to another amino acid residue of the sequence
  MISC_FEATURE (17)..(17): Xaa is phenylalanine, tyrosine, valine, leucine, isoleucine, methionine, or an amino acid residue which is covalently linked to another amino acid residue of the sequence
  MISC_FEATURE (21)..(21): Xaa is valine, leucine, isoleucine, alanine, methionine, or an amino acid residue which is covalently linked to another amino acid residue of the sequence
  MISC_FEATURE (22)..(22): Xaa is glycine, alanine, serine, or an amino acid residue which is covalently linked to another amino acid residue of the sequence
  MISC_FEATURE (23)..(23): Xaa is serine, glycine, alanine, threonine, or an amino acid residue which is covalently linked to another amino acid residue of the sequence
  MISC_FEATURE (24)..(24): Xaa is asparagine, glutamine, methionine, or an amino acid residue which is covalently linked to another amino acid residue of the sequence
  MISC_FEATURE (25)..(25): Xaa is lysine, arginine, or an amino acid residue which is covalently linked to another amino acid residue of the sequence
  MISC_FEATURE (26)..(26): Xaa is glycine, alanine, serine, or an amino acid residue which is covalently linked to another amino acid residue of the sequence
  MISC_FEATURE (27)..(27): Xaa is alanine, valine, glycine, serine, or an amino acid residue which is covalently linked to another amino acid residue of the sequence
  MISC_FEATURE (28)..(28): Xaa is isoleucine, leucine, valine, phenylalanine, methionine, or an amino acid residue which is covalently linked to another amino acid residue of the sequence
  MISC_FEATURE (29)..(29): Xaa is isoleucine, leucine, valine, phenylalanine, methionine, or an amino acid residue which is covalently linked to another amino acid residue of the sequence
  MISC_FEATURE (30)..(30): Xaa is glycine, alanine, serine, or an amino acid residue which is covalently linked to another amino acid residue of the sequence
  MISC_FEATURE (31)..(31): Xaa is leucine, isoleucine, valine, phenylalanine, methionine, or an amino acid residue which is covalently linked to another amino acid residue of the sequence
  MISC_FEATURE (32)..(32): Xaa is methionine, valine, leucine, isoleucine, alanine, or an amino acid residue which is covalently linked to another amino acid residue of the sequence
  MISC_FEATURE (33)..(33): Xaa is valine, leucine, isoleucine, alanine, methionine, or an amino acid residue which is covalently linked to another amino acid residue of the sequence
  MISC_FEATURE (34)..(34): Xaa is glycine, alanine, serine, or an amino acid residue which is covalently linked to another amino acid residue of the sequence
  MISC_FEATURE (35)..(35): Xaa is glycine, alanine, serine, or an amino acid residue which is covalently linked to another amino acid residue of the sequence
  MISC_FEATURE (36)..(36): Xaa is valine, leucine, isoleucine, alanine, methionine, or an amino acid residue which is covalently linked to another amino acid residue of the sequence
FRHDSGYEXXXXXXXXXAEDXXXXXXXXXXXXXXXXVI

SEQ ID NO: 744 - protein, 37 aa, Artificial Sequence
  synthetic
  MISC_FEATURE (8)..(8): Xaa is valine, leucine, isoleucine, alanine, methionine, or an amino acid residue which is covalently linked to another amino acid residue of the sequence
  MISC_FEATURE (9)..(9): Xaa is histidine, tyrosine, serine, methionine, or an amino acid residue which is covalently linked to another amino acid residue of the sequence
  MISC_FEATURE (10)..(10): Xaa is histidine, tyrosine, serine, methionine, or an amino acid residue which is covalently linked to another amino acid residue of the sequence
  MISC_FEATURE (11)..(11): Xaa is glutamine, asparagine, methionine, serine, or an amino acid which is covalently linked to another amino acid residue of the sequence
  MISC_FEATURE (12)..(12): Xaa is lysine, arginine, or an amino acid residue which is covalently linked to another amino acid residue of the sequence
  MISC_FEATURE (13)..(13): Xaa is leucine, isoleucine, valine, phenylalanine, methionine, or an amino acid residue which is covalently linked to another amino acid residue of the sequence
  MISC_FEATURE (14)..(14): Xaa is valine, leucine, isoleucine, alanine, methionine, or an amino acid residue which is covalently linked to another amino acid residue of the sequence
  MISC_FEATURE (15)..(15): Xaa is phenylalanine, tyrosine, valine, leucine, isoleucine, methionine, or an amino acid residue which is covalently linked to another amino acid residue of the sequence
  MISC_FEATURE (16)..(16): Xaa is phenylalanine, tyrosine, valine, leucine, isoleucine, methionine, or an amino acid residue which is covalently linked to another amino acid residue of the sequence
  MISC_FEATURE (20)..(20): Xaa is valine, leucine, isoleucine, alanine, methionine, or an amino acid residue which is covalently linked to another amino acid residue of the sequence
  MISC_FEATURE (21)..(21): Xaa is glycine, alanine, serine, or an amino acid residue which is covalently linked to another amino acid residue of the sequence
  MISC_FEATURE (22)..(22): Xaa is serine, glycine, alanine, threonine, or an amino acid residue which is covalently linked to another amino acid residue of the sequence
  MISC_FEATURE (23)..(23): Xaa is asparagine, glutamine, methionine, or an amino acid residue which is covalently linked to another amino acid residue of the sequence
  MISC_FEATURE (24)..(24): Xaa is lysine, arginine, or an amino acid residue which is covalently linked to another amino acid residue of the sequence
  MISC_FEATURE (25)..(25): Xaa is glycine, alanine, serine, or an amino acid residue which is covalently linked to another amino acid residue of the sequence
  MISC_FEATURE (26)..(26): Xaa is alanine, valine, glycine, serine, or an amino acid residue which is covalently linked to another amino acid residue of the sequence
  MISC_FEATURE (27)..(27): Xaa is isoleucine, leucine, valine, phenylalanine, methionine, or an amino acid residue which is covalently linked to another amino acid residue of the sequence
  MISC_FEATURE (28)..(28): Xaa is isoleucine, leucine, valine, phenylalanine, methionine, or an amino acid residue which is covalently linked to another amino acid residue of the sequence
  MISC_FEATURE (29)..(29): Xaa is glycine, alanine, serine, or an amino acid residue which is covalently linked to another amino acid residue of the sequence
  MISC_FEATURE (30)..(30): Xaa is leucine, isoleucine, valine, phenylalanine, methionine, or an amino acid residue which is covalently linked to another amino acid residue of the sequence
  MISC_FEATURE (31)..(31): Xaa is methionine, valine, leucine, isoleucine, alanine, or an amino acid residue which is covalently linked to another amino acid residue of the sequence
  MISC_FEATURE (32)..(32): Xaa is valine, leucine, isoleucine, alanine, methionine, or an amino acid residue which is covalently linked to another amino acid residue of the sequence
  MISC_FEATURE (33)..(33): Xaa is glycine, alanine, serine, or an amino acid residue which is covalently linked to another amino acid residue of the sequence
  MISC_FEATURE (34)..(34): Xaa is glycine, alanine, serine, or an amino acid residue which is covalently linked to another amino acid residue of the sequence
  MISC_FEATURE (35)..(35): Xaa is valine, leucine, isoleucine, alanine, methionine, or an amino acid residue which is covalently linked to another amino acid residue of the sequence
RHDSGYEXXXXXXXXXAEDXXXXXXXXXXXXXXXXVI

SEQ ID NO: 745 - protein, 36 aa, Artificial Sequence
  synthetic
  MISC_FEATURE (7)..(7): Xaa is valine, leucine, isoleucine, alanine, methionine, or an amino acid residue which is covalently linked to another amino acid residue of the sequence
  MISC_FEATURE (8)..(8): Xaa is histidine, tyrosine, serine, methionine, or an amino acid residue which is covalently linked to another amino acid residue of the sequence
  MISC_FEATURE (9)..(9): Xaa is histidine, tyrosine, serine, methionine, or an amino acid residue which is covalently linked to another amino acid residue of the sequence
  MISC_FEATURE (10)..(10): Xaa is glutamine, asparagine, methionine, serine, or an amino acid which is covalently linked to another amino acid residue of the sequence
  MISC_FEATURE (11)..(11): Xaa is lysine, arginine, or an amino acid residue which is covalently linked to another amino acid residue of the sequence
  MISC_FEATURE (12)..(12): Xaa is leucine, isoleucine, valine, phenylalanine, methionine, or an amino acid residue which is covalently linked to another amino acid residue of the sequence
  MISC_FEATURE (13)..(13): Xaa is valine, leucine, isoleucine, alanine, methionine, or an amino acid residue which is covalently linked to another amino acid residue of the sequence
  MISC_FEATURE (14)..(14): Xaa is phenylalanine, tyrosine, valine, leucine, isoleucine, methionine, or an amino acid residue which is covalently linked to another amino acid residue of the sequence
  MISC_FEATURE (15)..(15): Xaa is phenylalanine, tyrosine, valine, leucine, isoleucine, methionine, or an amino acid residue which is covalently linked to another amino acid residue of the sequence
  MISC_FEATURE (19)..(19): Xaa is valine, leucine, isoleucine, alanine, methionine, or an amino acid residue which is covalently linked to another amino acid residue of the sequence
  MISC_FEATURE (20)..(20): Xaa is glycine, alanine, serine, or an amino acid residue which is covalently linked to another amino acid residue of the sequence
  MISC_FEATURE (21)..(21): Xaa is serine, glycine, alanine, threonine, or an amino acid residue which is covalently linked to another amino acid residue of the sequence
  MISC_FEATURE (22)..(22): Xaa is asparagine, glutamine, methionine, or an amino acid residue which is covalently linked to another amino acid residue of the sequence
  MISC_FEATURE (23)..(23): Xaa is lysine, arginine, or an amino acid residue which is covalently linked to another amino acid residue of the sequence
  MISC_FEATURE (24)..(24): Xaa is glycine, alanine, serine, or an amino acid residue which is covalently linked to another amino acid residue of the sequence
  MISC_FEATURE (25)..(25): Xaa is alanine, valine, glycine, serine, or an amino acid residue which is covalently linked to another amino acid residue of the sequence
  MISC_FEATURE (26)..(26): Xaa is isoleucine, leucine, valine, phenylalanine, methionine, or an amino acid residue which is covalently linked to another amino acid residue of the sequence
  MISC_FEATURE (27)..(27): Xaa is isoleucine, leucine, valine, phenylalanine, methionine, or an amino acid residue which is covalently linked to another amino acid residue of the sequence
  MISC_FEATURE (28)..(28): Xaa is glycine, alanine, serine, or an amino acid residue which is covalently linked to another amino acid residue of the sequence
  MISC_FEATURE (29)..(29): Xaa is leucine, isoleucine, valine, phenylalanine, methionine, or an amino acid residue which is covalently linked to another amino acid residue of the sequence
  MISC_FEATURE (30)..(30): Xaa is methionine, valine, leucine, isoleucine, alanine, or an amino acid residue which is covalently linked to another amino acid residue of the sequence
  MISC_FEATURE (31)..(31): Xaa is valine, leucine, isoleucine, alanine, methionine, or an amino acid residue which is covalently linked to another amino acid residue of the sequence
  MISC_FEATURE (32)..(32): Xaa is glycine, alanine, serine, or an amino acid residue which is covalently linked to another amino acid residue of the sequence
  MISC_FEATURE (33)..(33): Xaa is glycine, alanine, serine, or an amino acid residue which is covalently linked to another amino acid residue of the sequence
  MISC_FEATURE (34)..(34): Xaa is valine, leucine, isoleucine, alanine, methionine, or an amino acid residue which is covalently linked to another amino acid residue of the sequence
HDSGYEXXXXXXXXXAEDXXXXXXXXXXXXXXXXVI

SEQ ID NO: 746 - protein, 35 aa, Artificial Sequence
  synthetic
  MISC_FEATURE (6)..(6): Xaa is valine, leucine, isoleucine, alanine, methionine, or an amino acid residue which is covalently linked to another amino acid residue of the sequence
  MISC_FEATURE (7)..(7): Xaa is histidine, tyrosine, serine, methionine, or an amino acid residue which is covalently linked to another amino acid residue of the sequence
  MISC_FEATURE (8)..(8): Xaa is histidine, tyrosine, serine, methionine, or an amino acid residue which is covalently linked to another amino acid residue of the sequence
  MISC_FEATURE (9)..(9): Xaa is glutamine, asparagine, methionine, serine, or an amino acid which is covalently linked to another amino acid residue of the sequence
  MISC_FEATURE (10)..(10): Xaa is lysine, arginine, or an amino acid residue which is covalently linked to another amino acid residue of the sequence
  MISC_FEATURE (11)..(11): Xaa is leucine, isoleucine, valine, phenylalanine, methionine, or an amino acid residue which is covalently linked to another amino acid residue of the sequence
  MISC_FEATURE (12)..(12): Xaa is valine, leucine, isoleucine, alanine, methionine, or an amino acid residue which is covalently linked to another amino acid residue of the sequence
  MISC_FEATURE (13)..(13): Xaa is phenylalanine, tyrosine, valine, leucine, isoleucine, methionine, or an amino acid residue which is covalently linked to another amino acid residue of the sequence
  MISC_FEATURE (14)..(14): Xaa is phenylalanine, tyrosine, valine, leucine, isoleucine, methionine, or an amino acid residue which is covalently linked to another amino acid residue of the sequence
  MISC_FEATURE (18)..(18): Xaa is valine, leucine, isoleucine, alanine, methionine, or an amino acid residue which is covalently linked to another amino acid residue of the sequence
  MISC_FEATURE (19)..(19): Xaa is glycine, alanine, serine, or an amino acid residue which is covalently linked to another amino acid residue of the sequence
  MISC_FEATURE (20)..(20): Xaa is serine, glycine, alanine, threonine, or an amino acid residue which is covalently linked to another amino acid residue of the sequence
  MISC_FEATURE (21)..(21): Xaa is asparagine, glutamine, methionine, or an amino acid residue which is covalently linked to another amino acid residue of the sequence
  MISC_FEATURE (22)..(22): Xaa is lysine, arginine, or an amino acid residue which is covalently linked to another amino acid residue of the sequence
  MISC_FEATURE (23)..(23): Xaa is glycine, alanine, serine, or an amino acid residue which is covalently linked to another amino acid residue of the sequence
  MISC_FEATURE (24)..(24): Xaa is alanine, valine, glycine, serine, or an amino acid residue which is covalently linked to another amino acid residue of the sequence
  MISC_FEATURE (25)..(25): Xaa is isoleucine, leucine, valine, phenylalanine, methionine, or an amino acid residue which is covalently linked to another amino acid residue of the sequence
  MISC_FEATURE (26)..(26): Xaa is isoleucine, leucine, valine, phenylalanine, methionine, or an amino acid residue which is covalently linked to another amino acid residue of the sequence
  MISC_FEATURE (27)..(27): Xaa is glycine, alanine, serine, or an amino acid residue which is covalently linked to another amino acid residue of the sequence
  MISC_FEATURE (28)..(28): Xaa is leucine, isoleucine, valine, phenylalanine, methionine, or an amino acid residue which is covalently linked to another amino acid residue of the sequence
  MISC_FEATURE (29)..(29): Xaa is methionine, valine, leucine, isoleucine, alanine, or an amino acid residue which is covalently linked to another amino acid residue of the sequence
  MISC_FEATURE (30)..(30): Xaa is valine, leucine, isoleucine, alanine, methionine, or an amino acid residue which is covalently linked to another amino acid residue of the sequence
  MISC_FEATURE (31)..(31): Xaa is glycine, alanine, serine, or an amino acid residue which is covalently linked to another amino acid residue of the sequence
  MISC_FEATURE (32)..(32): Xaa is glycine, alanine, serine, or an amino acid residue which is covalently linked to another amino acid residue of the sequence
  MISC_FEATURE (33)..(33): Xaa is valine, leucine, isoleucine, alanine, methionine, or an amino acid residue which is covalently linked to another amino acid residue of the sequence
DSGYEXXXXXXXXXAEDXXXXXXXXXXXXXXXXVI

SEQ ID NO: 747 - protein, 34 aa, Artificial Sequence
  synthetic
  MISC_FEATURE (5)..(5): Xaa is valine, leucine, isoleucine, alanine, methionine, or an amino acid residue which is covalently linked to another amino acid residue of the sequence
  MISC_FEATURE (6)..(6): Xaa is histidine, tyrosine, serine, methionine, or an amino acid residue which is covalently linked to another amino acid residue of the sequence
  MISC_FEATURE (7)..(7): Xaa is histidine, tyrosine, serine, methionine, or an amino acid residue which is covalently linked to another amino acid residue of the sequence
  MISC_FEATURE (8)..(8): Xaa is glutamine, asparagine, methionine, serine, or an amino acid which is covalently linked to another amino acid residue of the sequence
  MISC_FEATURE (9)..(9): Xaa is lysine, arginine, or an amino acid residue which is covalently linked to another amino acid residue of the sequence
  MISC_FEATURE (10)..(10): Xaa is leucine, isoleucine, valine, phenylalanine, methionine, or an amino acid residue which is covalently linked to another amino acid residue of the sequence
  MISC_FEATURE (11)..(11): Xaa is valine, leucine, isoleucine, alanine, methionine, or an amino acid residue which is covalently linked to another amino acid residue of the sequence
  MISC_FEATURE (12)..(12): Xaa is phenylalanine, tyrosine, valine, leucine, isoleucine, methionine, or an amino acid residue which is covalently linked to another amino acid residue of the sequence
  MISC_FEATURE (13)..(13): Xaa is phenylalanine, tyrosine, valine, leucine, isoleucine, methionine, or an amino acid residue which is covalently linked to another amino acid residue of the sequence
  MISC_FEATURE (17)..(17): Xaa is valine, leucine, isoleucine, alanine, methionine, or an amino acid residue which is covalently linked to another amino acid residue of the sequence
  MISC_FEATURE (18)..(18): Xaa is glycine, alanine, serine, or an amino acid residue which is covalently linked to another amino acid residue of the sequence
  MISC_FEATURE (19)..(19): Xaa is serine, glycine, alanine, threonine, or an amino acid residue which is covalently linked to another amino acid residue of the sequence
  MISC_FEATURE (20)..(20): Xaa is asparagine, glutamine, methionine, or an amino acid residue which is covalently linked to another amino acid residue of the sequence
  MISC_FEATURE (21)..(21): Xaa is lysine, arginine, or an amino acid residue which is covalently linked to another amino acid residue of the sequence
  MISC_FEATURE (22)..(22): Xaa is glycine, alanine, serine, or an amino acid residue which is covalently linked to another amino acid residue of the sequence
  MISC_FEATURE (23)..(23): Xaa is alanine, valine, glycine, serine, or an amino acid residue which is covalently linked to another amino acid residue of the sequence
  MISC_FEATURE (24)..(24): Xaa is isoleucine, leucine, valine, phenylalanine, methionine, or an amino acid residue which is covalently linked to another amino acid residue of the sequence
  MISC_FEATURE (25)..(25): Xaa is isoleucine, leucine, valine, phenylalanine, methionine, or an amino acid residue which is covalently linked to another amino acid residue of the sequence
  MISC_FEATURE (26)..(26): Xaa is glycine, alanine, serine, or an amino acid residue which is covalently linked to another amino acid residue of the sequence
  MISC_FEATURE (27)..(27): Xaa is leucine, isoleucine, valine, phenylalanine, methionine, or an amino acid residue which is covalently linked to another amino acid residue of the sequence
  MISC_FEATURE (28)..(28): Xaa is methionine, valine, leucine, isoleucine, alanine, or an amino acid residue which is covalently linked to another amino acid residue of the sequence
  MISC_FEATURE (29)..(29): Xaa is valine, leucine, isoleucine, alanine, methionine, or an amino acid residue which is covalently linked to another amino acid residue of the sequence
  MISC_FEATURE (30)..(30): Xaa is glycine, alanine, serine, or an amino acid residue which is covalently linked to another amino acid residue of the sequence
  MISC_FEATURE (31)..(31): Xaa is glycine, alanine, serine, or an amino acid residue which is covalently linked to another amino acid residue of the sequence
  MISC_FEATURE (32)..(32): Xaa is valine, leucine, isoleucine, alanine, methionine, or an amino acid residue which is covalently linked to another amino acid residue of the sequence
SGYEXXXXXXXXXAEDXXXXXXXXXXXXXXXXVI

SEQ ID NO: 748 - protein, 33 aa, Artificial Sequence
  synthetic
  MISC_FEATURE (4)..(4): Xaa is valine, leucine, isoleucine, alanine, methionine, or an amino acid residue which is covalently linked to another amino acid residue of the sequence
  MISC_FEATURE (5)..(5): Xaa is histidine, tyrosine, serine, methionine, or an amino acid residue which is covalently linked to another amino acid residue of the sequence
  MISC_FEATURE (6)..(6): Xaa is histidine, tyrosine, serine, methionine, or an amino acid residue which is covalently linked to another amino acid residue of the sequence
  MISC_FEATURE (7)..(7): Xaa is glutamine, asparagine, methionine, serine, or an amino acid which is covalently linked to another amino acid residue of the sequence
  MISC_FEATURE (8)..(8): Xaa is lysine, arginine, or an amino acid residue which is covalently linked to another amino acid residue of the sequence
  MISC_FEATURE (9)..(9): Xaa is leucine, isoleucine, valine, phenylalanine, methionine, or an amino acid residue which is covalently linked to another amino acid residue of the sequence
  MISC_FEATURE (10)..(10): Xaa is valine, leucine, isoleucine, alanine, methionine, or an amino acid residue which is covalently linked to another amino acid residue of the sequence
  MISC_FEATURE (11)..(11): Xaa is phenylalanine, tyrosine, valine, leucine, isoleucine, methionine, or an amino acid residue which is covalently linked to another amino acid residue of the sequence
  MISC_FEATURE (12)..(12): Xaa is phenylalanine, tyrosine, valine, leucine, isoleucine, methionine, or an amino acid residue which is covalently linked to another amino acid residue of the sequence
  MISC_FEATURE (16)..(16): Xaa is valine, leucine, isoleucine, alanine, methionine, or an amino acid residue which is covalently linked to another amino acid residue of the sequence
  MISC_FEATURE (17)..(17): Xaa is glycine, alanine, serine, or an amino acid residue which is covalently linked to another amino acid residue of the sequence
  MISC_FEATURE (18)..(18): Xaa is serine, glycine, alanine, threonine, or an amino acid residue which is covalently linked to another amino acid residue of the sequence
  MISC_FEATURE (19)..(19): Xaa is asparagine, glutamine, methionine, or an amino acid residue which is covalently linked to another amino acid residue of the sequence
  MISC_FEATURE (20)..(20): Xaa is lysine, arginine, or an amino acid residue which is covalently linked to another amino acid residue of the sequence
  MISC_FEATURE (21)..(21): Xaa is glycine, alanine, serine, or an amino acid residue which is covalently linked to another amino acid residue of the sequence
  MISC_FEATURE (22)..(22): Xaa is alanine, valine, glycine, serine, or an amino acid residue which is covalently linked to another amino acid residue of the sequence
  MISC_FEATURE (23)..(23): Xaa is isoleucine, leucine, valine, phenylalanine, methionine, or an amino acid residue which is covalently linked to another amino acid residue of the sequence
  MISC_FEATURE (24)..(24): Xaa is isoleucine, leucine, valine, phenylalanine, methionine, or an amino acid residue which is covalently linked to another amino acid residue of the sequence
  MISC_FEATURE (25)..(25): Xaa is glycine, alanine, serine, or an amino acid residue which is covalently linked to another amino acid residue of the sequence
  MISC_FEATURE (26)..(26): Xaa is leucine, isoleucine, valine, phenylalanine, methionine, or an amino acid residue which is covalently linked to another amino acid residue of the sequence
  MISC_FEATURE (27)..(27): Xaa is methionine, valine, leucine, isoleucine, alanine, or an amino acid residue which is covalently linked to another amino acid residue of the sequence
  MISC_FEATURE (28)..(28): Xaa is valine, leucine, isoleucine, alanine, methionine, or an amino acid residue which is covalently linked to another amino acid residue of the sequence
  MISC_FEATURE (29)..(29): Xaa is glycine, alanine, serine, or an amino acid residue which is covalently linked to another amino acid residue of the sequence
  MISC_FEATURE (30)..(30): Xaa is glycine, alanine, serine, or an amino acid residue which is covalently linked to another amino acid residue of the sequence
  MISC_FEATURE (31)..(31): Xaa is valine, leucine, isoleucine, alanine, methionine, or an amino acid residue which is covalently linked to another amino acid residue of the sequence
GYEXXXXXXXXXAEDXXXXXXXXXXXXXXXXVI

SEQ ID NO: 749 - protein, 32 aa, Artificial Sequence
  synthetic
  MISC_FEATURE (3)..(3): Xaa is valine, leucine, isoleucine, alanine, methionine, or an amino acid residue which is covalently linked to another amino acid residue of the sequence
  MISC_FEATURE (4)..(4): Xaa is histidine, tyrosine, serine, methionine, or an amino acid residue which is covalently linked to another amino acid residue of the sequence
  MISC_FEATURE (5)..(5): Xaa is histidine, tyrosine, serine, methionine, or an amino acid residue which is covalently linked to another amino acid residue of the sequence
  MISC_FEATURE (6)..(6): Xaa is glutamine, asparagine, methionine, serine, or an amino acid which is covalently linked to another amino acid residue of the sequence
  MISC_FEATURE (7)..(7): Xaa is lysine, arginine, or an amino acid residue which is covalently linked to another amino acid residue of the sequence
  MISC_FEATURE (8)..(8): Xaa is leucine, isoleucine, valine, phenylalanine, methionine, or an amino acid residue which is covalently linked to another amino acid residue of the sequence
  MISC_FEATURE (9)..(9): Xaa is valine, leucine, isoleucine, alanine, methionine, or an amino acid residue which is covalently linked to another amino acid residue of the sequence
  MISC_FEATURE (10)..(10): Xaa is phenylalanine, tyrosine, valine, leucine, isoleucine, methionine, or an amino acid residue which is covalently linked to another amino acid residue of the sequence
  MISC_FEATURE (11)..(11): Xaa is phenylalanine, tyrosine, valine, leucine, isoleucine, methionine, or an amino acid residue which is covalently linked to another amino acid residue of the sequence
  MISC_FEATURE (15)..(15): Xaa is valine, leucine, isoleucine, alanine, methionine, or an amino acid residue which is covalently linked to another amino acid residue of the sequence
  MISC_FEATURE (16)..(16): Xaa is glycine, alanine, serine, or an amino acid residue which is covalently linked to another amino acid residue of the sequence
  MISC_FEATURE (17)..(17): Xaa is serine, glycine, alanine, threonine, or an amino acid residue which is covalently linked to another amino acid residue of the sequence
  MISC_FEATURE (18)..(18): Xaa is asparagine, glutamine, methionine, or an amino acid residue which is covalently linked to another amino acid residue of the sequence
  MISC_FEATURE (19)..(19): Xaa is lysine, arginine, or an amino acid residue which is covalently linked to another amino acid residue of the sequence
  MISC_FEATURE (20)..(20): Xaa is glycine, alanine, serine, or an amino acid residue which is covalently linked to another amino acid residue of the sequence
  MISC_FEATURE (21)..(21): Xaa is alanine, valine, glycine, serine, or an amino acid residue which is covalently linked to another amino acid residue of the sequence
  MISC_FEATURE (22)..(22): Xaa is isoleucine, leucine, valine, phenylalanine, methionine, or an amino acid residue which is covalently linked to another amino acid residue of the sequence
  MISC_FEATURE (23)..(23): Xaa is isoleucine, leucine, valine, phenylalanine, methionine, or an amino acid residue which is covalently linked to another amino acid residue of the sequence
  MISC_FEATURE (24)..(24): Xaa is glycine, alanine, serine, or an amino acid residue which is covalently linked to another amino acid residue of the sequence
  MISC_FEATURE (25)..(25): Xaa is leucine, isoleucine, valine, phenylalanine, methionine, or an amino acid residue which is covalently linked to another amino acid residue of the sequence
  MISC_FEATURE (26)..(26): Xaa is methionine, valine, leucine, isoleucine, alanine, or an amino acid residue which is covalently linked to another amino acid residue of the sequence
  MISC_FEATURE (27)..(27): Xaa is valine, leucine, isoleucine, alanine, methionine, or an amino acid residue which is covalently linked to another amino acid residue of the sequence
  MISC_FEATURE (28)..(28): Xaa is glycine, alanine, serine, or an amino acid residue which is covalently linked to another amino acid residue of the sequence
  MISC_FEATURE (29)..(29): Xaa is glycine, alanine, serine, or an amino acid residue which is covalently linked to another amino acid residue of the sequence
  MISC_FEATURE (30)..(30): Xaa is valine, leucine, isoleucine, alanine, methionine, or an amino acid residue which is covalently linked to another amino acid residue of the sequence
YEXXXXXXXXXAEDXXXXXXXXXXXXXXXXVI

SEQ ID NO: 750 - protein, 31 aa, Artificial Sequence
  synthetic
  MISC_FEATURE (2)..(2): Xaa is valine, leucine, isoleucine, alanine, methionine, or an amino acid residue which is covalently linked to another amino acid residue of the sequence
  MISC_FEATURE (3)..(3): Xaa is histidine, tyrosine, serine, methionine, or an amino acid residue which is covalently linked to another amino acid residue of the sequence
  MISC_FEATURE (4)..(4): Xaa is histidine, tyrosine, serine, methionine, or an amino acid residue which is covalently linked to another amino acid residue of the sequence
  MISC_FEATURE (5)..(5): Xaa is glutamine, asparagine, methionine, serine, or an amino acid which is covalently linked to another amino acid residue of the sequence
  MISC_FEATURE (6)..(6): Xaa is lysine, arginine, or an amino acid residue which is covalently linked to another amino acid residue of the sequence
  MISC_FEATURE (7)..(7): Xaa is leucine, isoleucine, valine, phenylalanine, methionine, or an amino acid residue which is covalently linked to another amino acid residue of the sequence
  MISC_FEATURE (8)..(8): Xaa is valine, leucine, isoleucine, alanine, methionine, or an amino acid residue which is covalently linked to another amino acid residue of the sequence
  MISC_FEATURE (9)..(9): Xaa is phenylalanine, tyrosine, valine, leucine, isoleucine, methionine, or an amino acid residue which is covalently linked to another amino acid residue of the sequence
  MISC_FEATURE (10)..(10): Xaa is phenylalanine, tyrosine, valine, leucine, isoleucine, methionine, or an amino acid residue which is covalently linked to another amino acid residue of the sequence
  MISC_FEATURE (14)..(14): Xaa is valine, leucine, isoleucine, alanine, methionine, or an amino acid residue which is covalently linked to another amino acid residue of the sequence
  MISC_FEATURE (15)..(15): Xaa is glycine, alanine, serine, or an amino acid residue which is covalently linked to another amino acid residue of the sequence
  MISC_FEATURE (16)..(16): Xaa is serine, glycine, alanine, threonine, or an amino acid residue which is covalently linked to another amino acid residue of the sequence
  MISC_FEATURE (17)..(17): Xaa is asparagine, glutamine, methionine, or an amino acid residue which is covalently linked to another amino acid residue of the sequence
  MISC_FEATURE (18)..(18): Xaa is lysine, arginine, or an amino acid residue which is covalently linked to another amino acid residue of the sequence
  MISC_FEATURE (19)..(19): Xaa is glycine, alanine, serine, or an amino acid residue which is covalently linked to another amino acid residue of the sequence
  MISC_FEATURE (20)..(20): Xaa is alanine, valine, glycine, serine, or an amino acid residue which is covalently linked to another amino acid residue of the sequence
  MISC_FEATURE (21)..(21): Xaa is isoleucine, leucine, valine, phenylalanine, methionine, or an amino acid residue which is covalently linked to another amino acid residue of the sequence
  MISC_FEATURE (22)..(22): Xaa is isoleucine, leucine, valine, phenylalanine, methionine, or an amino acid residue which is covalently linked to another amino acid residue of the sequence
  MISC_FEATURE (23)..(23): Xaa is glycine, alanine, serine, or an amino acid residue which is covalently linked to another amino acid residue of the sequence
  MISC_FEATURE (24)..(24): Xaa is leucine, isoleucine, valine, phenylalanine, methionine, or an amino acid residue which is covalently linked to another amino acid residue of the sequence
  MISC_FEATURE (25)..(25): Xaa is methionine, valine, leucine, isoleucine, alanine, or an amino acid residue which is covalently linked to another amino acid residue of the sequence
  MISC_FEATURE (26)..(26): Xaa is valine, leucine, isoleucine, alanine, methionine, or an amino acid residue which is covalently linked to another amino acid residue of the sequence
  MISC_FEATURE (27)..(27): Xaa is glycine, alanine, serine, or an amino acid residue which is covalently linked to another amino acid residue of the sequence
  MISC_FEATURE (28)..(28): Xaa is glycine, alanine, serine, or an amino acid residue which is covalently linked to another amino acid residue of the sequence
  MISC_FEATURE (29)..(29): Xaa is valine, leucine, isoleucine, alanine, methionine, or an amino acid residue which is covalently linked to another amino acid residue of the sequence
EXXXXXXXXXAEDXXXXXXXXXXXXXXXXVI

SEQ ID NO: 751 - protein, 30 aa, Artificial Sequence
  synthetic
  MISC_FEATURE (1)..(1): Xaa is valine, leucine, isoleucine, alanine, methionine, or an amino acid residue which is covalently linked to another amino acid residue of the sequence
  MISC_FEATURE (2)..(2): Xaa is histidine, tyrosine, serine, methionine, or an amino acid residue which is covalently linked to another amino acid residue of the sequence
  MISC_FEATURE (3)..(3): Xaa is histidine, tyrosine, serine, methionine, or an amino acid residue which is covalently linked to another amino acid residue of the sequence
  MISC_FEATURE (4)..(4): Xaa is glutamine, asparagine, methionine, serine, or an amino acid which is covalently linked to another amino acid residue of the sequence
  MISC_FEATURE (5)..(5): Xaa is lysine, arginine, or an amino acid residue which is covalently linked to another amino acid residue of the sequence
  MISC_FEATURE (6)..(6): Xaa is leucine, isoleucine, valine, phenylalanine, methionine, or an amino acid residue which is covalently linked to another amino acid residue of the sequence
  MISC_FEATURE (7)..(7): Xaa is valine, leucine, isoleucine, alanine, methionine, or an amino acid residue which is covalently linked to another amino acid residue of the sequence
  MISC_FEATURE (8)..(8): Xaa is phenylalanine, tyrosine, valine, leucine, isoleucine, methionine, or an amino acid residue which is covalently linked to another amino acid residue of the sequence
  MISC_FEATURE (9)..(9): Xaa is phenylalanine, tyrosine, valine, leucine, isoleucine, methionine, or an amino acid residue which is covalently linked to another amino acid residue of the sequence
  MISC_FEATURE (13)..(13): Xaa is valine, leucine, isoleucine, alanine, methionine, or an amino acid residue which is covalently linked to another amino acid residue of the sequence
  MISC_FEATURE (14)..(14): Xaa is glycine, alanine, serine, or an amino acid residue which is covalently linked to another amino acid residue of the sequence
  MISC_FEATURE (15)..(15): Xaa is serine, glycine, alanine, threonine, or an amino acid residue which is covalently linked to another amino acid residue of the sequence
  MISC_FEATURE (16)..(16): Xaa is asparagine, glutamine, methionine, or an amino acid residue which is covalently linked to another amino acid residue of the sequence
  MISC_FEATURE (17)..(17): Xaa is lysine, arginine, or an amino acid residue which is covalently linked to another amino acid residue of the sequence
  MISC_FEATURE (18)..(18): Xaa is glycine, alanine, serine, or an amino acid residue which is covalently linked to another amino acid residue of the sequence
  MISC_FEATURE (19)..(19): Xaa is alanine, valine, glycine, serine, or an amino acid residue which is covalently linked to another amino acid residue of the sequence
  MISC_FEATURE (20)..(20): Xaa is isoleucine, leucine, valine, phenylalanine, methionine, or an amino acid residue which is covalently linked to another amino acid residue of the sequence
  MISC_FEATURE (21)..(21): Xaa is isoleucine, leucine, valine, phenylalanine, methionine, or an amino acid residue which is covalently linked to another amino acid residue of the sequence
  MISC_FEATURE (22)..(22): Xaa is glycine, alanine, serine, or an amino acid residue which is covalently linked to another amino acid residue of the sequence
  MISC_FEATURE (23)..(23): Xaa is leucine, isoleucine, valine, phenylalanine, methionine, or an amino acid residue which is covalently linked to another amino acid residue of the sequence
  MISC_FEATURE (24)..(24): Xaa is methionine, valine, leucine, isoleucine, alanine, or an amino acid residue which is covalently linked to another amino acid residue of the sequence
  MISC_FEATURE (25)..(25): Xaa is valine, leucine, isoleucine, alanine, methionine, or an amino acid residue which is covalently linked to another amino acid residue of the sequence
  MISC_FEATURE (26)..(26): Xaa is glycine, alanine, serine, or an amino acid residue which is covalently linked to another amino acid residue of the sequence
  MISC_FEATURE (27)..(27): Xaa is glycine, alanine, serine, or an amino acid residue which is covalently linked to another amino acid residue of the sequence
  MISC_FEATURE (28)..(28): Xaa is valine, leucine, isoleucine, alanine, methionine, or an amino acid residue which is covalently linked to another amino acid residue of the sequence
XXXXXXXXXAEDXXXXXXXXXXXXXXXXVI

SEQ ID NO: 752 - protein, 29 aa, Artificial Sequence
  synthetic
  MISC_FEATURE (1)..(1): Xaa is histidine, tyrosine, serine, methionine, or an amino acid residue which is covalently linked to another amino acid residue of the sequence
  MISC_FEATURE (2)..(2): Xaa is histidine, tyrosine, serine, methionine, or an amino acid residue which is covalently linked to another amino acid residue of the sequence
  MISC_FEATURE (3)..(3): Xaa is glutamine, asparagine, methionine, serine, or an amino acid which is covalently linked to another amino acid residue of the sequence
  MISC_FEATURE (4)..(4): Xaa is lysine, arginine, or an amino acid residue which is covalently linked to another amino acid residue of the sequence
  MISC_FEATURE (5)..(5): Xaa is leucine, isoleucine, valine, phenylalanine, methionine, or an amino acid residue which is covalently linked to another amino acid residue of the sequence
  MISC_FEATURE (6)..(6): Xaa is valine, leucine, isoleucine, alanine, methionine, or an amino acid residue which is covalently linked to another amino acid residue of the sequence
  MISC_FEATURE (7)..(7): Xaa is phenylalanine, tyrosine, valine, leucine, isoleucine, methionine, or an amino acid residue which is covalently linked to another amino acid residue of the sequence
  MISC_FEATURE (8)..(8): Xaa is phenylalanine, tyrosine, valine, leucine, isoleucine, methionine, or an amino acid residue which is covalently linked to another amino acid residue of the sequence
  MISC_FEATURE (12)..(12): Xaa is valine, leucine, isoleucine, alanine, methionine, or an amino acid residue which is covalently linked to another amino acid residue of the sequence
  MISC_FEATURE (13)..(13): Xaa is glycine, alanine, serine, or an amino acid residue which is covalently linked to another amino acid residue of the sequence
  MISC_FEATURE (14)..(14): Xaa is serine, glycine, alanine, threonine, or an amino acid residue which is covalently linked to another amino acid residue of the sequence
  MISC_FEATURE (15)..(15): Xaa is asparagine, glutamine, methionine, or an amino acid residue which is covalently linked to another amino acid residue of the sequence
  MISC_FEATURE (16)..(16): Xaa is lysine, arginine, or an amino acid residue which is covalently linked to another amino acid residue of the sequence
  MISC_FEATURE (17)..(17): Xaa is glycine, alanine, serine, or an amino acid residue which is covalently linked to another amino acid residue of the sequence
  MISC_FEATURE (18)..(18): Xaa is alanine, valine, glycine, serine, or an amino acid residue which is covalently linked to another amino acid residue of the sequence
  MISC_FEATURE (19)..(19): Xaa is isoleucine, leucine, valine, phenylalanine, methionine, or an amino acid residue which is covalently linked to another amino acid residue of the sequence
  MISC_FEATURE (20)..(20): Xaa is isoleucine, leucine, valine, phenylalanine, methionine, or an amino acid residue which is covalently linked to another amino acid residue of the sequence
  MISC_FEATURE (21)..(21): Xaa is glycine, alanine, serine, or an amino acid residue which is covalently linked to another amino acid residue of the sequence
  MISC_FEATURE (22)..(22): Xaa is leucine, isoleucine, valine, phenylalanine, methionine, or an amino acid residue which is covalently linked to another amino acid residue of the sequence
  MISC_FEATURE (23)..(23): Xaa is methionine, valine, leucine, isoleucine, alanine, or an amino acid residue which is covalently linked to another amino acid residue of the sequence
  MISC_FEATURE (24)..(24): Xaa is valine, leucine, isoleucine, alanine, methionine, or an amino acid residue which is covalently linked to another amino acid residue of the sequence
  MISC_FEATURE (25)..(25): Xaa is glycine, alanine, serine, or an amino acid residue which is covalently linked to another amino acid residue of the sequence
  MISC_FEATURE (26)..(26): Xaa is glycine, alanine, serine, or an amino acid residue which is covalently linked to another amino acid residue of the sequence
XXXXXXXXAEDXXXXXXXXXXXXXXXVVI

SEQ ID NO: 753 - protein, 28 aa, Artificial Sequence
  synthetic
  MISC_FEATURE (1)..(1): Xaa is histidine, tyrosine, serine, methionine, or an amino acid residue which is covalently linked to another amino acid residue of the sequence
  MISC_FEATURE (2)..(2): Xaa is glutamine, asparagine, methionine, serine, or an amino acid which is covalently linked to another amino acid residue of the sequence
  MISC_FEATURE (3)..(3): Xaa is lysine, arginine, or an amino acid residue which is covalently linked to another amino acid residue of the sequence
  MISC_FEATURE (4)..(4): Xaa is leucine, isoleucine, valine, phenylalanine, methionine, or an amino acid residue which is covalently linked to another amino acid residue of the sequence
  MISC_FEATURE (5)..(5): Xaa is valine, leucine, isoleucine, alanine, methionine, or an amino acid residue which is covalently linked to another amino acid residue of the sequence
  MISC_FEATURE (6)..(6): Xaa is phenylalanine, tyrosine, valine, leucine, isoleucine, methionine, or an amino acid residue which is covalently linked to another amino acid residue of the sequence
  MISC_FEATURE (7)..(7): Xaa is phenylalanine, tyrosine, valine, leucine, isoleucine, methionine, or an amino acid residue which is covalently linked to another amino acid residue of the sequence
  MISC_FEATURE (11)..(11): Xaa is valine, leucine, isoleucine, alanine, methionine, or an amino acid residue which is covalently linked to another amino acid residue of the sequence
  MISC_FEATURE (12)..(12): Xaa is glycine, alanine, serine, or an amino acid residue which is covalently linked to another amino acid residue of the sequence
  MISC_FEATURE (13)..(13): Xaa is serine, glycine, alanine, threonine, or an amino acid residue which is covalently linked to another amino acid residue of the sequence
  MISC_FEATURE (14)..(14): Xaa is asparagine, glutamine, methionine, or an amino acid residue which is covalently linked to another amino acid residue of the sequence
  MISC_FEATURE (15)..(15): Xaa is lysine, arginine, or an amino acid residue which is covalently linked to another amino acid residue of the sequence
  MISC_FEATURE (16)..(16): Xaa is glycine, alanine, serine, or an amino acid residue which is covalently linked to another amino acid residue of the sequence
  MISC_FEATURE (17)..(17): Xaa is alanine, valine, glycine, serine, or an amino acid residue which is covalently linked to another amino acid residue of the sequence
  MISC_FEATURE (18)..(18): Xaa is isoleucine, leucine, valine, phenylalanine, methionine, or an amino acid residue which is covalently linked to another amino acid residue of the sequence
  MISC_FEATURE (19)..(19): Xaa is isoleucine, leucine, valine, phenylalanine, methionine, or an amino acid residue which is covalently linked to another amino acid residue of the sequence
  MISC_FEATURE (20)..(20): Xaa is glycine, alanine, serine, or an amino acid residue which is covalently linked to another amino acid residue of the sequence
  MISC_FEATURE (21)..(21): Xaa is leucine, isoleucine, valine, phenylalanine, methionine, or an amino acid residue which is covalently linked to another amino acid residue of the sequence
  MISC_FEATURE (22)..(22): Xaa is methionine, valine, leucine, isoleucine, alanine, or an amino acid residue which is covalently linked to another amino acid residue of the sequence
  MISC_FEATURE (23)..(23): Xaa is valine, leucine, isoleucine, alanine, methionine, or an amino acid residue which is covalently linked to another amino acid residue of the sequence
  MISC_FEATURE (24)..(24): Xaa is glycine, alanine, serine, or an amino acid residue which is covalently linked to another amino acid residue of the sequence
XXXXXXXAEDXXXXXXXXXXXXXXGVVI

SEQ ID NO: 754 - protein, 27 aa, Artificial Sequence
  synthetic
  MISC_FEATURE (1)..(1): Xaa is glutamine, asparagine, methionine, serine, or an amino acid which is covalently linked to another amino acid residue of the sequence
  MISC_FEATURE (2)..(2): Xaa is lysine, arginine, or an amino acid residue which is covalently linked to another amino acid residue of the sequence
  MISC_FEATURE (3)..(3): Xaa is leucine, isoleucine, valine, phenylalanine, methionine, or an amino acid residue which is covalently linked to another amino acid residue of the sequence
  MISC_FEATURE (4)..(4): Xaa is valine, leucine, isoleucine, alanine, methionine, or an amino acid residue which is covalently linked to another amino acid residue of the sequence
  MISC_FEATURE (5)..(5): Xaa is phenylalanine, tyrosine, valine, leucine, isoleucine, methionine, or an amino acid residue which is covalently linked to another amino acid residue of the sequence
  MISC_FEATURE (6)..(6): Xaa is phenylalanine, tyrosine, valine, leucine, isoleucine, methionine, or an amino acid residue which is covalently linked to another amino acid residue of the sequence
  MISC_FEATURE (10)..(10): Xaa is valine, leucine, isoleucine, alanine, methionine, or an amino acid residue which is covalently linked to another amino acid residue of the sequence
  MISC_FEATURE (11)..(11): Xaa is glycine, alanine, serine, or an amino acid residue which is covalently linked to another amino acid residue of the sequence
  MISC_FEATURE (12)..(12): Xaa is serine, glycine, alanine, threonine, or an amino acid residue which is covalently linked to another amino acid residue of the sequence
  MISC_FEATURE (13)..(13): Xaa is asparagine, glutamine, methionine, or an amino acid residue which is covalently linked to another amino acid residue of the sequence
  MISC_FEATURE (14)..(14): Xaa is lysine, arginine, or an amino acid residue which is covalently linked to another amino acid residue of the sequence
  MISC_FEATURE (15)..(15): Xaa is glycine, alanine, serine, or an amino acid residue which is covalently linked to another amino acid residue of the sequence
  MISC_FEATURE (16)..(16): Xaa is alanine, valine, glycine, serine, or an amino acid residue which is covalently linked to another amino acid residue of the sequence
  MISC_FEATURE (17)..(17): Xaa is isoleucine, leucine, valine, phenylalanine, methionine, or an amino acid residue which is covalently linked to another amino acid residue of the sequence
  MISC_FEATURE (18)..(18): Xaa is isoleucine, leucine, valine, phenylalanine, methionine, or an amino acid residue which is covalently linked to another amino acid residue of the sequence
  MISC_FEATURE (19)..(19): Xaa is glycine, alanine, serine, or an amino acid residue which is covalently linked to another amino acid residue of the sequence
  MISC_FEATURE (20)..(20): Xaa is leucine, isoleucine, valine, phenylalanine, methionine, or an amino acid residue which is covalently linked to another amino acid residue of the sequence
  MISC_FEATURE (21)..(21): Xaa is methionine, valine, leucine, isoleucine, alanine, or an amino acid residue which is covalently linked to another amino acid residue of the sequence
  MISC_FEATURE (22)..(22): Xaa is valine, leucine, isoleucine, alanine, methionine, or an amino acid residue which is covalently linked to another amino acid residue of the sequence
XXXXXXAEDXXXXXXXXXXXXXGGVVI

SEQ ID NO: 755 - protein, 26 aa, Artificial Sequence
  synthetic
  MISC_FEATURE (1)..(1): Xaa is lysine, arginine, or an amino acid residue which is covalently linked to another amino acid residue of the sequence
  MISC_FEATURE (2)..(2): Xaa is leucine, isoleucine, valine, phenylalanine, methionine, or an amino acid residue which is covalently linked to another amino acid residue of the sequence
  MISC_FEATURE (3)..(3): Xaa is valine, leucine, isoleucine, alanine, methionine, or an amino acid residue which is covalently linked to another amino acid residue of the sequence
  MISC_FEATURE (4)..(4): Xaa is phenylalanine, tyrosine, valine, leucine, isoleucine, methionine, or an amino acid residue which is covalently linked to another amino acid residue of the sequence
  MISC_FEATURE (5)..(5): Xaa is phenylalanine, tyrosine, valine, leucine, isoleucine, methionine, or an amino acid residue which is covalently linked to another amino acid residue of the sequence
  MISC_FEATURE (9)..(9): Xaa is valine, leucine, isoleucine, alanine, methionine, or an amino acid residue which is covalently linked to another amino acid residue of the sequence
  MISC_FEATURE (10)..(10): Xaa is glycine, alanine, serine, or an amino acid residue which is covalently linked to another amino acid residue of the sequence
  MISC_FEATURE (11)..(11): Xaa is serine, glycine, alanine, threonine, or an amino acid residue which is covalently linked to another amino acid residue of the sequence
  MISC_FEATURE (12)..(12): Xaa is asparagine, glutamine, methionine, or an amino acid residue which is covalently linked to another amino acid residue of the sequence
  MISC_FEATURE (13)..(13): Xaa is lysine, arginine, or an amino acid residue which is covalently linked to another amino acid residue of the sequence
  MISC_FEATURE (14)..(14): Xaa is glycine, alanine, serine, or an amino acid residue which is covalently linked to another amino acid residue of the sequence
  MISC_FEATURE (15)..(15): Xaa is alanine, valine, glycine, serine, or an amino acid residue which is covalently linked to another amino acid residue of the sequence
  MISC_FEATURE (16)..(16): Xaa is isoleucine, leucine, valine, phenylalanine, methionine, or an amino acid residue which is covalently linked to another amino acid residue of the sequence
  MISC_FEATURE (17)..(17): Xaa is isoleucine, leucine, valine, phenylalanine, methionine, or an amino acid residue which is covalently linked to another amino acid residue of the sequence
  MISC_FEATURE (18)..(18): Xaa is glycine, alanine, serine, or an amino acid residue which is covalently linked to another amino acid residue of the sequence
  MISC_FEATURE (19)..(19): Xaa is leucine, isoleucine, valine, phenylalanine, methionine, or an amino acid residue which is covalently linked to another amino acid residue of the sequence
  MISC_FEATURE (20)..(20): Xaa is methionine, valine, leucine, isoleucine, alanine, or an amino acid residue which is covalently linked to another amino acid residue of the sequence
XXXXXAEDXXXXXXXXXXXXVGGVVI

SEQ ID NO: 756 - protein, 25 aa, Artificial Sequence
  synthetic
  MISC_FEATURE (1)..(1): Xaa is leucine, isoleucine, valine, phenylalanine, methionine, or an amino acid residue which is covalently linked to another amino acid residue of the sequence
  MISC_FEATURE (2)..(2): Xaa is valine, leucine, isoleucine, alanine, methionine, or an amino acid residue which is covalently linked to another amino acid residue of the sequence
  MISC_FEATURE (3)..(3): Xaa is phenylalanine, tyrosine, valine, leucine, isoleucine, methionine, or an amino acid residue which is covalently linked to another amino acid residue of the sequence
  MISC_FEATURE (4)..(4): Xaa is phenylalanine, tyrosine, valine, leucine, isoleucine, methionine, or an amino acid residue which is covalently linked to another amino acid residue of the sequence
  MISC_FEATURE (8)..(8): Xaa is valine, leucine, isoleucine, alanine, methionine, or an amino acid residue which is covalently linked to another amino acid residue of the sequence
  MISC_FEATURE (9)..(9): Xaa is glycine, alanine, serine, or an amino acid residue which is covalently linked to another amino acid residue of the sequence
  MISC_FEATURE (10)..(10): Xaa is serine, glycine, alanine, threonine, or an amino acid residue which is covalently linked to another amino acid residue of the sequence
  MISC_FEATURE (11)..(11): Xaa is asparagine, glutamine, methionine, or an amino acid residue which is covalently linked to another amino acid residue of the sequence
  MISC_FEATURE (12)..(12): Xaa is lysine, arginine, or an amino acid residue which is covalently linked to another amino acid residue of the sequence
  MISC_FEATURE (13)..(13): Xaa is glycine, alanine, serine, or an amino acid residue which is covalently linked to another amino acid residue of the sequence
  MISC_FEATURE (14)..(14): Xaa is alanine, valine, glycine, serine, or an amino acid residue which is covalently linked to another amino acid residue of the sequence
  MISC_FEATURE (15)..(15): Xaa is isoleucine, leucine, valine, phenylalanine, methionine, or an amino acid residue which is covalently linked to another amino acid residue of the sequence
  MISC_FEATURE (16)..(16): Xaa is isoleucine, leucine, valine, phenylalanine, methionine, or an amino acid residue which is covalently linked to another amino acid residue of the sequence
  MISC_FEATURE (17)..(17): Xaa is glycine, alanine, serine, or an amino acid residue which is covalently linked to another amino acid residue of the sequence
  MISC_FEATURE (18)..(18): Xaa is leucine, isoleucine, valine, phenylalanine, methionine, or an amino acid residue which is covalently linked to another amino acid residue of the sequence
XXXXAEDXXXXXXXXXXXMVGGVVI

SEQ ID NO: 757 - protein, 24 aa, Artificial Sequence
  synthetic
  MISC_FEATURE (1)..(1): Xaa is valine, leucine, isoleucine, alanine, methionine, or an amino acid residue which is covalently linked to another amino acid residue of the sequence
  MISC_FEATURE (2)..(2): Xaa is phenylalanine, tyrosine, valine, leucine, isoleucine, methionine, or an amino acid residue which is covalently linked to another amino acid residue of the sequence
  MISC_FEATURE (3)..(3): Xaa is phenylalanine, tyrosine, valine, leucine, isoleucine, methionine, or an amino acid residue which is covalently linked to another amino acid residue of the sequence
  MISC_FEATURE (7)..(7): Xaa is valine, leucine, isoleucine, alanine, methionine, or an amino acid residue which is covalently linked to another amino acid residue of the sequence
  MISC_FEATURE (8)..(8): Xaa is glycine, alanine, serine, or an amino acid residue which is covalently linked to another amino acid residue of the sequence
  MISC_FEATURE (9)..(9): Xaa is serine, glycine, alanine, threonine, or an amino acid residue which is covalently linked to another amino acid residue of the sequence
  MISC_FEATURE (10)..(10): Xaa is asparagine, glutamine, methionine, or an amino acid residue which is covalently linked to another amino acid residue of the sequence
  MISC_FEATURE (11)..(11): Xaa is lysine, arginine, or an amino acid residue which is covalently linked to another amino acid residue of the sequence
  MISC_FEATURE (12)..(12): Xaa is glycine, alanine, serine, or an amino acid residue which is covalently linked to another amino acid residue of the sequence
  MISC_FEATURE (13)..(13): Xaa is alanine, valine, glycine, serine, or an amino acid residue which is covalently linked to another amino acid residue of the sequence
  MISC_FEATURE (14)..(14): Xaa is isoleucine, leucine, valine, phenylalanine, methionine, or an amino acid residue which is covalently linked to another amino acid residue of the sequence
  MISC_FEATURE (15)..(15): Xaa is isoleucine, leucine, valine, phenylalanine, methionine, or an amino acid residue which is covalently linked to another amino acid residue of the sequence
  MISC_FEATURE (16)..(16): Xaa is glycine, alanine, serine, or an amino acid residue which is covalently linked to another amino acid residue of the sequence
XXXAEDXXXXXXXXXXLMVGGVVI

SEQ ID NO: 758 - protein, 23 aa, Artificial Sequence
  synthetic
  MISC_FEATURE (1)..(1): Xaa is phenylalanine, tyrosine, valine, leucine, isoleucine, methionine, or an amino acid residue which is covalently linked to another amino acid residue of the sequence
  MISC_FEATURE (2)..(2): Xaa is phenylalanine, tyrosine, valine, leucine, isoleucine, methionine, or an amino acid residue which is covalently linked to another amino acid residue of the sequence
  MISC_FEATURE (6)..(6): Xaa is valine, leucine, isoleucine, alanine, methionine, or an amino acid residue which is covalently linked to another amino acid residue of the sequence
  MISC_FEATURE (7)..(7): Xaa is glycine, alanine, serine, or an amino acid residue which is covalently linked to another amino acid residue of the sequence
  MISC_FEATURE (8)..(8): Xaa is serine, glycine, alanine, threonine, or an amino acid residue which is covalently linked to another amino acid residue of the sequence
  MISC_FEATURE (9)..(9): Xaa is asparagine, glutamine, methionine, or an amino acid residue which is covalently linked to another amino acid residue of the sequence
  MISC_FEATURE (10)..(10): Xaa is lysine, arginine, or an amino acid residue which is covalently linked to another amino acid residue of the sequence
  MISC_FEATURE (11)..(11): Xaa is glycine, alanine, serine, or an amino acid residue which is covalently linked to another amino acid residue of the sequence
  MISC_FEATURE (12)..(12): Xaa is alanine, valine, glycine, serine, or an amino acid residue which is covalently linked to another amino acid residue of the sequence
  MISC_FEATURE (13)..(13): Xaa is isoleucine, leucine, valine, phenylalanine, methionine, or an amino acid residue which is covalently linked to another amino acid residue of the sequence
  MISC_FEATURE (14)..(14): Xaa is isoleucine, leucine, valine, phenylalanine, methionine, or an amino acid residue which is covalently linked to another amino acid residue of the sequence
XXAEDXXXXXXXXXGLMVGGVVI

SEQ ID NO: 759 - protein, 22 aa, Artificial Sequence
  synthetic
  MISC_FEATURE (1)..(1): Xaa is phenylalanine, tyrosine, valine, leucine, isoleucine, methionine, or an amino acid residue which is covalently linked to another amino acid residue of the sequence
  MISC_FEATURE (5)..(5): Xaa is valine, leucine, isoleucine, alanine, methionine, or an amino acid residue which is covalently linked to another amino acid residue of the sequence
  MISC_FEATURE (6)..(6): Xaa is glycine, alanine, serine, or an amino acid residue which is covalently linked to another amino acid residue of the sequence
  MISC_FEATURE (7)..(7): Xaa is serine, glycine, alanine, threonine, or an amino acid residue which is covalently linked to another amino acid residue of the sequence
  MISC_FEATURE (8)..(8): Xaa is asparagine, glutamine, methionine, or an amino acid residue which is covalently linked to another amino acid residue of the sequence
  MISC_FEATURE (9)..(9): Xaa is lysine, arginine, or an amino acid residue which is covalently linked to another amino acid residue of the sequence
  MISC_FEATURE (10)..(10): Xaa is glycine, alanine, serine, or an amino acid residue which is covalently linked to another amino acid residue of the sequence
  MISC_FEATURE (11)..(11): Xaa is alanine, valine, glycine, serine, or an amino acid residue which is covalently linked to another amino acid residue of the sequence
  MISC_FEATURE (12)..(12): Xaa is isoleucine, leucine, valine, phenylalanine, methionine, or an amino acid residue which is covalently linked to another amino acid residue of the sequence
  MISC_FEATURE (32)..(32): Xaa is isoleucine, leucine, valine, phenylalanine, methionine, or an amino acid residue which is covalently linked to another amino acid residue of the sequence
XAEDXXXXXXXXIGLMVGGVVI

SEQ ID NO: 760 - protein, 40 aa, Artificial Sequence
  synthetic
  MISC_FEATURE (12)..(12): Xaa is valine, leucine, isoleucine, alanine, methionine, or an amino acid residue which is covalently linked to another amino acid residue of the sequence
  MISC_FEATURE (13)..(13): Xaa is histidine, tyrosine, serine, methionine, or an amino acid residue which is covalently linked to another amino acid residue of the sequence
  MISC_FEATURE (14)..(14): Xaa is histidine, tyrosine, serine, methionine, or an amino acid residue which is covalently linked to another amino acid residue of the sequence
  MISC_FEATURE (15)..(15): Xaa is glutamine, asparagine, methionine, serine, or an amino acid which is covalently linked to another amino acid residue of the sequence
  MISC_FEATURE (16)..(16): Xaa is lysine, arginine, or an amino acid residue which is covalently linked to another amino acid residue of the sequence
  MISC_FEATURE (17)..(17): Xaa is leucine, isoleucine, valine, phenylalanine, methionine, or an amino acid residue which is covalently linked to another amino acid residue of the sequence
  MISC_FEATURE (18)..(18): Xaa is valine, leucine, isoleucine, alanine, methionine, or an amino acid residue which is covalently linked to another amino acid residue of the sequence
  MISC_FEATURE (19)..(19): Xaa is phenylalanine, tyrosine, valine, leucine, isoleucine, methionine, or an amino acid residue which is covalently linked to another amino acid residue of the sequence
  MISC_FEATURE (20)..(20): Xaa is phenylalanine, tyrosine, valine, leucine, isoleucine, methionine, or an amino acid residue which is covalently linked to another amino acid residue of the sequence
  MISC_FEATURE (24)..(24): Xaa is valine, leucine, isoleucine, alanine, methionine, or an amino acid residue which is covalently linked to another amino acid residue of the sequence
  MISC_FEATURE (25)..(25): Xaa is glycine, alanine, serine, or an amino acid residue which is covalently linked to another amino acid residue of the sequence
  MISC_FEATURE (26)..(26): Xaa is serine, glycine, alanine, threonine, or an amino acid residue which is covalently linked to another amino acid residue of the sequence
  MISC_FEATURE (27)..(27): Xaa is asparagine, glutamine, methionine, or an amino acid residue which is covalently linked to another amino acid residue of the sequence
  MISC_FEATURE (28)..(28): Xaa is lysine, arginine, or an amino acid residue which is covalently linked to another amino acid residue of the sequence
  MISC_FEATURE (29)..(29): Xaa is glycine, alanine, serine, or an amino acid residue which is covalently linked to another amino acid residue of the sequence
  MISC_FEATURE (30)..(30): Xaa is alanine, valine, glycine, serine, or an amino acid residue which is covalently linked to another amino acid residue of the sequence
  MISC_FEATURE (31)..(31): Xaa is isoleucine, leucine, valine, phenylalanine, methionine, or an amino acid residue which is covalently linked to another amino acid residue of the sequence
  MISC_FEATURE (32)..(32): Xaa is isoleucine, leucine, valine, phenylalanine, methionine, or an amino acid residue which is covalently linked to another amino acid residue of the sequence
  MISC_FEATURE (33)..(33): Xaa is glycine, alanine, serine, or an amino acid residue which is covalently linked to another amino acid residue of the sequence
  MISC_FEATURE (34)..(34): Xaa is leucine, isoleucine, valine, phenylalanine, methionine, or an amino acid residue which is covalently linked to another amino acid residue of the sequence
  MISC_FEATURE (35)..(35): Xaa is methionine, valine, leucine, isoleucine, alanine, or an amino acid residue which is covalently linked to another amino acid residue of the sequence
  MISC_FEATURE (36)..(36): Xaa is valine, leucine, isoleucine, alanine, methionine, or an amino acid residue which is covalently linked to another amino acid residue of the sequence
  MISC_FEATURE (37)..(37): Xaa is glycine, alanine, serine, or an amino acid residue which is covalently linked to another amino acid residue of the sequence
  MISC_FEATURE (38)..(38): Xaa is glycine, alanine, serine, or an amino acid residue which is covalently linked to another amino acid residue of the sequence
  MISC_FEATURE (39)..(39): Xaa is valine, leucine, isoleucine, alanine, methionine, or an amino acid residue which is covalently linked to another amino acid residue of the sequence
DAEFRHDSGYEXXXXXXXXXAEDXXXXXXXXXXXXXXXXV

SEQ ID NO: 761 - protein, 39 aa, Artificial Sequence
  synthetic
  MISC_FEATURE (11)..(11): Xaa is valine, leucine, isoleucine, alanine, methionine, or an amino acid residue which is covalently linked to another amino acid residue of the sequence
  MISC_FEATURE (12)..(12): Xaa is histidine, tyrosine, serine, methionine, or an amino acid residue which is covalently linked to another amino acid residue of the sequence
  MISC_FEATURE (13)..(13): Xaa is histidine, tyrosine, serine, methionine, or an amino acid residue which is covalently linked to another amino acid residue of the sequence
  MISC_FEATURE (14)..(14): Xaa is glutamine, asparagine, methionine, serine, or an amino acid which is covalently linked to another amino acid residue of the sequence
  MISC_FEATURE (15)..(15): Xaa is lysine, arginine, or an amino acid residue which is covalently linked to another amino acid residue of the sequence
  MISC_FEATURE (16)..(16): Xaa is leucine, isoleucine, valine, phenylalanine, methionine, or an amino acid residue which is covalently linked to another amino acid residue of the sequence
  MISC_FEATURE (17)..(17): Xaa is valine, leucine, isoleucine, alanine, methionine, or an amino acid residue which is covalently linked to another amino acid residue of the sequence
  MISC_FEATURE (18)..(18): Xaa is phenylalanine, tyrosine, valine, leucine, isoleucine, methionine, or an amino acid residue which is covalently linked to another amino acid residue of the sequence
  MISC_FEATURE (19)..(19): Xaa is phenylalanine, tyrosine, valine, leucine, isoleucine, methionine, or an amino acid residue which is covalently linked to another amino acid residue of the sequence
  MISC_FEATURE (23)..(23): Xaa is valine, leucine, isoleucine, alanine, methionine, or an amino acid residue which is covalently linked to another amino acid residue of the sequence
  MISC_FEATURE (24)..(24): Xaa is glycine, alanine, serine, or an amino acid residue which is covalently linked to another amino acid residue of the sequence
  MISC_FEATURE (25)..(25): Xaa is serine, glycine, alanine, threonine, or an amino acid residue which is covalently linked to another amino acid residue of the sequence
  MISC_FEATURE (26)..(26): Xaa is asparagine, glutamine, methionine, or an amino acid residue which is covalently linked to another amino acid residue of the sequence
  MISC_FEATURE (27)..(27): Xaa is lysine, arginine, or an amino acid residue which is covalently linked to another amino acid residue of the sequence
  MISC_FEATURE (28)..(28): Xaa is glycine, alanine, serine, or an amino acid residue which is covalently linked to another amino acid residue of the sequence
  MISC_FEATURE (29)..(29): Xaa is alanine, valine, glycine, serine, or an amino acid residue which is covalently linked to another amino acid residue of the sequence
  MISC_FEATURE (30)..(30): Xaa is isoleucine, leucine, valine, phenylalanine, methionine, or an amino acid residue which is covalently linked to another amino acid residue of the sequence
  MISC_FEATURE (31)..(31): Xaa is isoleucine, leucine, valine, phenylalanine, methionine, or an amino acid residue which is covalently linked to another amino acid residue of the sequence
  MISC_FEATURE (32)..(32): Xaa is glycine, alanine, serine, or an amino acid residue which is covalently linked to another amino acid residue of the sequence
  MISC_FEATURE (33)..(33): Xaa is leucine, isoleucine, valine, phenylalanine, methionine, or an amino acid residue which is covalently linked to another amino acid residue of the sequence
  MISC_FEATURE (34)..(34): Xaa is methionine, valine, leucine, isoleucine, alanine, or an amino acid residue which is covalently linked to another amino acid residue of the sequence
  MISC_FEATURE (35)..(35): Xaa is valine, leucine, isoleucine, alanine, methionine, or an amino acid residue which is covalently linked to another amino acid residue of the sequence
  MISC_FEATURE (36)..(36): Xaa is glycine, alanine, serine, or an amino acid residue which is covalently linked to another amino acid residue of the sequence
  MISC_FEATURE (37)..(37): Xaa is glycine, alanine, serine, or an amino acid residue which is covalently linked to another amino acid residue of the sequence
  MISC_FEATURE (38)..(38): Xaa is valine, leucine, isoleucine, alanine, methionine, or an amino acid residue which is covalently linked to another amino acid residue of the sequence
AEFRHDSGYEXXXXXXXXXAEDXXXXXXXXXXXXXXXXV

SEQ ID NO: 762 - protein, 38 aa, Artificial Sequence
  synthetic
  MISC_FEATURE (10)..(10): Xaa is valine, leucine, isoleucine, alanine, methionine, or an amino acid residue which is covalently linked to another amino acid residue of the sequence
  MISC_FEATURE (11)..(11): Xaa is histidine, tyrosine, serine, methionine, or an amino acid residue which is covalently linked to another amino acid residue of the sequence
  MISC_FEATURE (12)..(12): Xaa is histidine, tyrosine, serine, methionine, or an amino acid residue which is covalently linked to another amino acid residue of the sequence
  MISC_FEATURE (13)..(13): Xaa is glutamine, asparagine, methionine, serine, or an amino acid which is covalently linked to another amino acid residue of the sequence
  MISC_FEATURE (14)..(14): Xaa is lysine, arginine, or an amino acid residue which is covalently linked to another amino acid residue of the sequence
  MISC_FEATURE (15)..(15): Xaa is leucine, isoleucine, valine, phenylalanine, methionine, or an amino acid residue which is covalently linked to another amino acid residue of the sequence
  MISC_FEATURE (16)..(16): Xaa is valine, leucine, isoleucine, alanine, methionine, or an amino acid residue which is covalently linked to another amino acid residue of the sequence
  MISC_FEATURE (17)..(17): Xaa is phenylalanine, tyrosine, valine, leucine, isoleucine, methionine, or an amino acid residue which is covalently linked to another amino acid residue of the sequence
  MISC_FEATURE (18)..(18): Xaa is phenylalanine, tyrosine, valine, leucine, isoleucine, methionine, or an amino acid residue which is covalently linked to another amino acid residue of the sequence
  MISC_FEATURE (22)..(22): Xaa is valine, leucine, isoleucine, alanine, methionine, or an amino acid residue which is covalently linked to another amino acid residue of the sequence
  MISC_FEATURE (23)..(23): Xaa is glycine, alanine, serine, or an amino acid residue which is covalently linked to another amino acid residue of the sequence
  MISC_FEATURE (24)..(24): Xaa is serine, glycine, alanine, threonine, or an amino acid residue which is covalently linked to another amino acid residue of the sequence
  MISC_FEATURE (25)..(25): Xaa is asparagine, glutamine, methionine, or an amino acid residue which is covalently linked to another amino acid residue of the sequence
  MISC_FEATURE (26)..(26): Xaa is lysine, arginine, or an amino acid residue which is covalently linked to another amino acid residue of the sequence
  MISC_FEATURE (27)..(27): Xaa is glycine, alanine, serine, or an amino acid residue which is covalently linked to another amino acid residue of the sequence
  MISC_FEATURE (28)..(28): Xaa is alanine, valine, glycine, serine, or an amino acid residue which is covalently linked to another amino acid residue of the sequence
  MISC_FEATURE (29)..(29): Xaa is isoleucine, leucine, valine, phenylalanine, methionine, or an amino acid residue which is covalently linked to another amino acid residue of the sequence
  MISC_FEATURE (30)..(30): Xaa is isoleucine, leucine, valine, phenylalanine, methionine, or an amino acid residue which is covalently linked to another amino acid residue of the sequence
  MISC_FEATURE (31)..(31): Xaa is glycine, alanine, serine, or an amino acid residue which is covalently linked to another amino acid residue of the sequence
  MISC_FEATURE (32)..(32): Xaa is leucine, isoleucine, valine, phenylalanine, methionine, or an amino acid residue which is covalently linked to another amino acid residue of the sequence
  MISC_FEATURE (33)..(33): Xaa is methionine, valine, leucine, isoleucine, alanine, or an amino acid residue which is covalently linked to another amino acid residue of the sequence
  MISC_FEATURE (34)..(34): Xaa is valine, leucine, isoleucine, alanine, methionine, or an amino acid residue which is covalently linked to another amino acid residue of the sequence
  MISC_FEATURE (35)..(35): Xaa is glycine, alanine, serine, or an amino acid residue which is covalently linked to another amino acid residue of the sequence
  MISC_FEATURE (36)..(36): Xaa is glycine, alanine, serine, or an amino acid residue which is covalently linked to another amino acid residue of the sequence
  MISC_FEATURE (37)..(37): Xaa is valine, leucine, isoleucine, alanine, methionine, or an amino acid residue which is covalently linked to another amino acid residue of the sequence
EFRHDSGYEXXXXXXXXXAEDXXXXXXXXXXXXXXXXV

SEQ ID NO: 763 - protein, 37 aa, Artificial Sequence
  synthetic
  MISC_FEATURE (9)..(9): Xaa is valine, leucine, isoleucine, alanine, methionine, or an amino acid residue which is covalently linked to another amino acid residue of the sequence
  MISC_FEATURE (10)..(10): Xaa is histidine, tyrosine, serine, methionine, or an amino acid residue which is covalently linked to another amino acid residue of the sequence
  MISC_FEATURE (11)..(11): Xaa is histidine, tyrosine, serine, methionine, or an amino acid residue which is covalently linked to another amino acid residue of the sequence
  MISC_FEATURE (12)..(12): Xaa is glutamine, asparagine, methionine, serine, or an amino acid which is covalently linked to another amino acid residue of the sequence
  MISC_FEATURE (13)..(13): Xaa is lysine, arginine, or an amino acid residue which is covalently linked to another amino acid residue of the sequence
  MISC_FEATURE (14)..(14): Xaa is leucine, isoleucine, valine, phenylalanine, methionine, or an amino acid residue which is covalently linked to another amino acid residue of the sequence
  MISC_FEATURE (15)..(15): Xaa is valine, leucine, isoleucine, alanine, methionine, or an amino acid residue which is covalently linked to another amino acid residue of the sequence
  MISC_FEATURE (16)..(16): Xaa is phenylalanine, tyrosine, valine, leucine, isoleucine, methionine, or an amino acid residue which is covalently linked to another amino acid residue of the sequence
  MISC_FEATURE (17)..(17): Xaa is phenylalanine, tyrosine, valine, leucine, isoleucine, methionine, or an amino acid residue which is covalently linked to another amino acid residue of the sequence
  MISC_FEATURE (21)..(21): Xaa is valine, leucine, isoleucine, alanine, methionine, or an amino acid residue which is covalently linked to another amino acid residue of the sequence
  MISC_FEATURE (22)..(22): Xaa is glycine, alanine, serine, or an amino acid residue which is covalently linked to another amino acid residue of the sequence
  MISC_FEATURE (23)..(23): Xaa is serine, glycine, alanine, threonine, or an amino acid residue which is covalently linked to another amino acid residue of the sequence
  MISC_FEATURE (24)..(24): Xaa is asparagine, glutamine, methionine, or an amino acid residue which is covalently linked to another amino acid residue of the sequence
  MISC_FEATURE (25)..(25): Xaa is lysine, arginine, or an amino acid residue which is covalently linked to another amino acid residue of the sequence
  MISC_FEATURE (26)..(26): Xaa is glycine, alanine, serine, or an amino acid residue which is covalently linked to another amino acid residue of the sequence
  MISC_FEATURE (27)..(27): Xaa is alanine, valine, glycine, serine, or an amino acid residue which is covalently linked to another amino acid residue of the sequence
  MISC_FEATURE (28)..(28): Xaa is isoleucine, leucine, valine, phenylalanine, methionine, or an amino acid residue which is covalently linked to another amino acid residue of the sequence
  MISC_FEATURE (29)..(29): Xaa is isoleucine, leucine, valine, phenylalanine, methionine, or an amino acid residue which is covalently linked to another amino acid residue of the sequence
  MISC_FEATURE (30)..(30): Xaa is glycine, alanine, serine, or an amino acid residue which is covalently linked to another amino acid residue of the sequence
  MISC_FEATURE (31)..(31): Xaa is leucine, isoleucine, valine, phenylalanine, methionine, or an amino acid residue which is covalently linked to another amino acid residue of the sequence
  MISC_FEATURE (32)..(32): Xaa is methionine, valine, leucine, isoleucine, alanine, or an amino acid residue which is covalently linked to another amino acid residue of the sequence
  MISC_FEATURE (33)..(33): Xaa is valine, leucine, isoleucine, alanine, methionine, or an amino acid residue which is covalently linked to another amino acid residue of the sequence
  MISC_FEATURE (34)..(34): Xaa is glycine, alanine, serine, or an amino acid residue which is covalently linked to another amino acid residue of the sequence
  MISC_FEATURE (35)..(35): Xaa is glycine, alanine, serine, or an amino acid residue which is covalently linked to another amino acid residue of the sequence
  MISC_FEATURE (36)..(36): Xaa is valine, leucine, isoleucine, alanine, methionine, or an amino acid residue which is covalently linked to another amino acid residue of the sequence
FRHDSGYEXXXXXXXXXAEDXXXXXXXXXXXXXXXXV

SEQ ID NO: 764 - protein, 36 aa, Artificial Sequence
  synthetic
  MISC_FEATURE (8)..(8): Xaa is valine, leucine, isoleucine, alanine, methionine, or an amino acid residue which is covalently linked to another amino acid residue of the sequence
  MISC_FEATURE (9)..(9): Xaa is histidine, tyrosine, serine, methionine, or an amino acid residue which is covalently linked to another amino acid residue of the sequence
  MISC_FEATURE (10)..(10): Xaa is histidine, tyrosine, serine, methionine, or an amino acid residue which is covalently linked to another amino acid residue of the sequence
  MISC_FEATURE (11)..(11): Xaa is glutamine, asparagine, methionine, serine, or an amino acid which is covalently linked to another amino acid residue of the sequence
  MISC_FEATURE (12)..(12): Xaa is lysine, arginine, or an amino acid residue which is covalently linked to another amino acid residue of the sequence
  MISC_FEATURE (13)..(13): Xaa is leucine, isoleucine, valine, phenylalanine, methionine, or an amino acid residue which is covalently linked to another amino acid residue of the sequence
  MISC_FEATURE (14)..(14): Xaa is valine, leucine, isoleucine, alanine, methionine, or an amino acid residue which is covalently linked to another amino acid residue of the sequence
  MISC_FEATURE (15)..(15): Xaa is phenylalanine, tyrosine, valine, leucine, isoleucine, methionine, or an amino acid residue which is covalently linked to another amino acid residue of the sequence
  MISC_FEATURE (16)..(16): Xaa is phenylalanine, tyrosine, valine, leucine, isoleucine, methionine, or an amino acid residue which is covalently linked to another amino acid residue of the sequence
  MISC_FEATURE (20)..(20): Xaa is valine, leucine, isoleucine, alanine, methionine, or an amino acid residue which is covalently linked to another amino acid residue of the sequence
  MISC_FEATURE (21)..(21): Xaa is glycine, alanine, serine, or an amino acid residue which is covalently linked to another amino acid residue of the sequence
  MISC_FEATURE (22)..(22): Xaa is serine, glycine, alanine, threonine, or an amino acid residue which is covalently linked to another amino acid residue of the sequence
  MISC_FEATURE (23)..(23): Xaa is asparagine, glutamine, methionine, or an amino acid residue which is covalently linked to another amino acid residue of the sequence
  MISC_FEATURE (24)..(24): Xaa is lysine, arginine, or an amino acid residue which is covalently linked to another amino acid residue of the sequence
  MISC_FEATURE (25)..(25): Xaa is glycine, alanine, serine, or an amino acid residue which is covalently linked to another amino acid residue of the sequence
  MISC_FEATURE (26)..(26): Xaa is alanine, valine, glycine, serine, or an amino acid residue which is covalently linked to another amino acid residue of the sequence
  MISC_FEATURE (27)..(27): Xaa is isoleucine, leucine, valine, phenylalanine, methionine, or an amino acid residue which is covalently linked to another amino acid residue of the sequence
  MISC_FEATURE (28)..(28): Xaa is isoleucine, leucine, valine, phenylalanine, methionine, or an amino acid residue which is covalently linked to another amino acid residue of the sequence
  MISC_FEATURE (29)..(29): Xaa is glycine, alanine, serine, or an amino acid residue which is covalently linked to another amino acid residue of the sequence
  MISC_FEATURE (30)..(30): Xaa is leucine, isoleucine, valine, phenylalanine, methionine, or an amino acid residue which is covalently linked to another amino acid residue of the sequence
  MISC_FEATURE (31)..(31): Xaa is methionine, valine, leucine, isoleucine, alanine, or an amino acid residue which is covalently linked to another amino acid residue of the sequence
  MISC_FEATURE (32)..(32): Xaa is valine, leucine, isoleucine, alanine, methionine, or an amino acid residue which is covalently linked to another amino acid residue of the sequence
  MISC_FEATURE (33)..(33): Xaa is glycine, alanine, serine, or an amino acid residue which is covalently linked to another amino acid residue of the sequence
  MISC_FEATURE (34)..(34): Xaa is glycine, alanine, serine, or an amino acid residue which is covalently linked to another amino acid residue of the sequence
  MISC_FEATURE (35)..(35): Xaa is valine, leucine, isoleucine, alanine, methionine, or an amino acid residue which is covalently linked to another amino acid residue of the sequence
RHDSGYEXXXXXXXXXAEDXXXXXXXXXXXXXXXXV

SEQ ID NO: 765 - protein, 35 aa, Artificial Sequence
  synthetic
  MISC_FEATURE (7)..(7): Xaa is valine, leucine, isoleucine, alanine, methionine, or an amino acid residue which is covalently linked to another amino acid residue of the sequence
  MISC_FEATURE (8)..(8): Xaa is histidine, tyrosine, serine, methionine, or an amino acid residue which is covalently linked to another amino acid residue of the sequence
  MISC_FEATURE (9)..(9): Xaa is histidine, tyrosine, serine, methionine, or an amino acid residue which is covalently linked to another amino acid residue of the sequence
  MISC_FEATURE (10)..(10): Xaa is glutamine, asparagine, methionine, serine, or an amino acid which is covalently linked to another amino acid residue of the sequence
  MISC_FEATURE (11)..(11): Xaa is lysine, arginine, or an amino acid residue which is covalently linked to another amino acid residue of the sequence
  MISC_FEATURE (12)..(12): Xaa is leucine, isoleucine, valine, phenylalanine, methionine, or an amino acid residue which is covalently linked to another amino acid residue of the sequence
  MISC_FEATURE (13)..(13): Xaa is valine, leucine, isoleucine, alanine, methionine, or an amino acid residue which is covalently linked to another amino acid residue of the sequence
  MISC_FEATURE (14)..(14): Xaa is phenylalanine, tyrosine, valine, leucine, isoleucine, methionine, or an amino acid residue which is covalently linked to another amino acid residue of the sequence
  MISC_FEATURE (15)..(15): Xaa is phenylalanine, tyrosine, valine, leucine, isoleucine, methionine, or an amino acid residue which is covalently linked to another amino acid residue of the sequence
  MISC_FEATURE (19)..(19): Xaa is valine, leucine, isoleucine, alanine, methionine, or an amino acid residue which is covalently linked to another amino acid residue of the sequence
  MISC_FEATURE (20)..(20): Xaa is glycine, alanine, serine, or an amino acid residue which is covalently linked to another amino acid residue of the sequence
  MISC_FEATURE (21)..(21): Xaa is serine, glycine, alanine, threonine, or an amino acid residue which is covalently linked to another amino acid residue of the sequence
  MISC_FEATURE (22)..(22): Xaa is asparagine, glutamine, methionine, or an amino acid residue which is covalently linked to another amino acid residue of the sequence
  MISC_FEATURE (23)..(23): Xaa is lysine, arginine, or an amino acid residue which is covalently linked to another amino acid residue of the sequence
  MISC_FEATURE (24)..(24): Xaa is glycine, alanine, serine, or an amino acid residue which is covalently linked to another amino acid residue of the sequence
  MISC_FEATURE (25)..(25): Xaa is alanine, valine, glycine, serine, or an amino acid residue which is covalently linked to another amino acid residue of the sequence
  MISC_FEATURE (26)..(26): Xaa is isoleucine, leucine, valine, phenylalanine, methionine, or an amino acid residue which is covalently linked to another amino acid residue of the sequence
  MISC_FEATURE (27)..(27): Xaa is isoleucine, leucine, valine, phenylalanine, methionine, or an amino acid residue which is covalently linked to another amino acid residue of the sequence
  MISC_FEATURE (28)..(28): Xaa is glycine, alanine, serine, or an amino acid residue which is covalently linked to another amino acid residue of the sequence
  MISC_FEATURE (29)..(29): Xaa is leucine, isoleucine, valine, phenylalanine, methionine, or an amino acid residue which is covalently linked to another amino acid residue of the sequence
  MISC_FEATURE (30)..(30): Xaa is methionine, valine, leucine, isoleucine, alanine, or an amino acid residue which is covalently linked to another amino acid residue of the sequence
  MISC_FEATURE (31)..(31): Xaa is valine, leucine, isoleucine, alanine, methionine, or an amino acid residue which is covalently linked to another amino acid residue of the sequence
  MISC_FEATURE (32)..(32): Xaa is glycine, alanine, serine, or an amino acid residue which is covalently linked to another amino acid residue of the sequence
  MISC_FEATURE (33)..(33): Xaa is glycine, alanine, serine, or an amino acid residue which is covalently linked to another amino acid residue of the sequence
  MISC_FEATURE (34)..(34): Xaa is valine, leucine, isoleucine, alanine, methionine, or an amino acid residue which is covalently linked to another amino acid residue of the sequence
HDSGYEXXXXXXXXXAEDXXXXXXXXXXXXXXXXV

SEQ ID NO: 766 - protein, 34 aa, Artificial Sequence
  synthetic
  MISC_FEATURE (6)..(6): Xaa is valine, leucine, isoleucine, alanine, methionine, or an amino acid residue which is covalently linked to another amino acid residue of the sequence
  MISC_FEATURE (7)..(7): Xaa is histidine, tyrosine, serine, methionine, or an amino acid residue which is covalently linked to another amino acid residue of the sequence
  MISC_FEATURE (8)..(8): Xaa is histidine, tyrosine, serine, methionine, or an amino acid residue which is covalently linked to another amino acid residue of the sequence
  MISC_FEATURE (9)..(9): Xaa is glutamine, asparagine, methionine, serine, or an amino acid which is covalently linked to another amino acid residue of the sequence
  MISC_FEATURE (10)..(10): Xaa is lysine, arginine, or an amino acid residue which is covalently linked to another amino acid residue of the sequence
  MISC_FEATURE (11)..(11): Xaa is leucine, isoleucine, valine, phenylalanine, methionine, or an amino acid residue which is covalently linked to another amino acid residue of the sequence
  MISC_FEATURE (12)..(12): Xaa is valine, leucine, isoleucine, alanine, methionine, or an amino acid residue which is covalently linked to another amino acid residue of the sequence
  MISC_FEATURE (13)..(13): Xaa is phenylalanine, tyrosine, valine, leucine, isoleucine, methionine, or an amino acid residue which is covalently linked to another amino acid residue of the sequence
  MISC_FEATURE (14)..(14): Xaa is phenylalanine, tyrosine, valine, leucine, isoleucine, methionine, or an amino acid residue which is covalently linked to another amino acid residue of the sequence
  MISC_FEATURE (18)..(18): Xaa is valine, leucine, isoleucine, alanine, methionine, or an amino acid residue which is covalently linked to another amino acid residue of the sequence
  MISC_FEATURE (19)..(19): Xaa is glycine, alanine, serine, or an amino acid residue which is covalently linked to another amino acid residue of the sequence
  MISC_FEATURE (20)..(20): Xaa is serine, glycine, alanine, threonine, or an amino acid residue which is covalently linked to another amino acid residue of the sequence
  MISC_FEATURE (21)..(21): Xaa is asparagine, glutamine, methionine, or an amino acid residue which is covalently linked to another amino acid residue of the sequence
  MISC_FEATURE (22)..(22): Xaa is lysine, arginine, or an amino acid residue which is covalently linked to another amino acid residue of the sequence
  MISC_FEATURE (23)..(23): Xaa is glycine, alanine, serine, or an amino acid residue which is covalently linked to another amino acid residue of the sequence
  MISC_FEATURE (24)..(24): Xaa is alanine, valine, glycine, serine, or an amino acid residue which is covalently linked to another amino acid residue of the sequence
  MISC_FEATURE (25)..(25): Xaa is isoleucine, leucine, valine, phenylalanine, methionine, or an amino acid residue which is covalently linked to another amino acid residue of the sequence
  MISC_FEATURE (26)..(26): Xaa is isoleucine, leucine, valine, phenylalanine, methionine, or an amino acid residue which is covalently linked to another amino acid residue of the sequence
  MISC_FEATURE (27)..(27): Xaa is glycine, alanine, serine, or an amino acid residue which is covalently linked to another amino acid residue of the sequence
  MISC_FEATURE (28)..(28): Xaa is leucine, isoleucine, valine, phenylalanine, methionine, or an amino acid residue which is covalently linked to another amino acid residue of the sequence
  MISC_FEATURE (29)..(29): Xaa is methionine, valine, leucine, isoleucine, alanine, or an amino acid residue which is covalently linked to another amino acid residue of the sequence
  MISC_FEATURE (30)..(30): Xaa is valine, leucine, isoleucine, alanine, methionine, or an amino acid residue which is covalently linked to another amino acid residue of the sequence
  MISC_FEATURE (31)..(31): Xaa is glycine, alanine, serine, or an amino acid residue which is covalently linked to another amino acid residue of the sequence
  MISC_FEATURE (32)..(32): Xaa is glycine, alanine, serine, or an amino acid residue which is covalently linked to another amino acid residue of the sequence
  MISC_FEATURE (33)..(33): Xaa is valine, leucine, isoleucine, alanine, methionine, or an amino acid residue which is covalently linked to another amino acid residue of the sequence
DSGYEXXXXXXXXXAEDXXXXXXXXXXXXXXXXV

SEQ ID NO: 767 - protein, 33 aa, Artificial Sequence
  synthetic
  MISC_FEATURE (5)..(5): Xaa is valine, leucine, isoleucine, alanine, methionine, or an amino acid residue which is covalently linked to another amino acid residue of the sequence
  MISC_FEATURE (6)..(6): Xaa is histidine, tyrosine, serine, methionine, or an amino acid residue which is covalently linked to another amino acid residue of the sequence
  MISC_FEATURE (7)..(7): Xaa is histidine, tyrosine, serine, methionine, or an amino acid residue which is covalently linked to another amino acid residue of the sequence
  MISC_FEATURE (8)..(8): Xaa is glutamine, asparagine, methionine, serine, or an amino acid which is covalently linked to another amino acid residue of the sequence
  MISC_FEATURE (9)..(9): Xaa is lysine, arginine, or an amino acid residue which is covalently linked to another amino acid residue of the sequence
  MISC_FEATURE (10)..(10): Xaa is leucine, isoleucine, valine, phenylalanine, methionine, or an amino acid residue which is covalently linked to another amino acid residue of the sequence
  MISC_FEATURE (11)..(11): Xaa is valine, leucine, isoleucine, alanine, methionine, or an amino acid residue which is covalently linked to another amino acid residue of the sequence
  MISC_FEATURE (12)..(12): Xaa is phenylalanine, tyrosine, valine, leucine, isoleucine, methionine, or an amino acid residue which is covalently linked to another amino acid residue of the sequence
  MISC_FEATURE (13)..(13): Xaa is phenylalanine, tyrosine, valine, leucine, isoleucine, methionine, or an amino acid residue which is covalently linked to another amino acid residue of the sequence
  MISC_FEATURE (17)..(17): Xaa is valine, leucine, isoleucine, alanine, methionine, or an amino acid residue which is covalently linked to another amino acid residue of the sequence
  MISC_FEATURE (18)..(18): Xaa is glycine, alanine, serine, or an amino acid residue which is covalently linked to another amino acid residue of the sequence
  MISC_FEATURE (19)..(19): Xaa is serine, glycine, alanine, threonine, or an amino acid residue which is covalently linked to another amino acid residue of the sequence
  MISC_FEATURE (20)..(20): Xaa is asparagine, glutamine, methionine, or an amino acid residue which is covalently linked to another amino acid residue of the sequence
  MISC_FEATURE (21)..(21): Xaa is lysine, arginine, or an amino acid residue which is covalently linked to another amino acid residue of the sequence
  MISC_FEATURE (22)..(22): Xaa is glycine, alanine, serine, or an amino acid residue which is covalently linked to another amino acid residue of the sequence
  MISC_FEATURE (23)..(23): Xaa is alanine, valine, glycine, serine, or an amino acid residue which is covalently linked to another amino acid residue of the sequence
  MISC_FEATURE (24)..(24): Xaa is isoleucine, leucine, valine, phenylalanine, methionine, or an amino acid residue which is covalently linked to another amino acid residue of the sequence
  MISC_FEATURE (25)..(25): Xaa is isoleucine, leucine, valine, phenylalanine, methionine, or an amino acid residue which is covalently linked to another amino acid residue of the sequence
  MISC_FEATURE (26)..(26): Xaa is glycine, alanine, serine, or an amino acid residue which is covalently linked to another amino acid residue of the sequence
  MISC_FEATURE (27)..(27): Xaa is leucine, isoleucine, valine, phenylalanine, methionine, or an amino acid residue which is covalently linked to another amino acid residue of the sequence
  MISC_FEATURE (28)..(28): Xaa is methionine, valine, leucine, isoleucine, alanine, or an amino acid residue which is covalently linked to another amino acid residue of the sequence
  MISC_FEATURE (29)..(29): Xaa is valine, leucine, isoleucine, alanine, methionine, or an amino acid residue which is covalently linked to another amino acid residue of the sequence
  MISC_FEATURE (30)..(30): Xaa is glycine, alanine, serine, or an amino acid residue which is covalently linked to another amino acid residue of the sequence
  MISC_FEATURE (31)..(31): Xaa is glycine, alanine, serine, or an amino acid residue which is covalently linked to another amino acid residue of the sequence
  MISC_FEATURE (32)..(32): Xaa is valine, leucine, isoleucine, alanine, methionine, or an amino acid residue which is covalently linked to another amino acid residue of the sequence
SGYEXXXXXXXXXAEDXXXXXXXXXXXXXXXXV

SEQ ID NO: 768 - protein, 32 aa, Artificial Sequence
  synthetic
  MISC_FEATURE (4)..(4): Xaa is valine, leucine, isoleucine, alanine, methionine, or an amino acid residue which is covalently linked to another amino acid residue of the sequence
  MISC_FEATURE (5)..(5): Xaa is histidine, tyrosine, serine, methionine, or an amino acid residue which is covalently linked to another amino acid residue of the sequence
  MISC_FEATURE (6)..(6): Xaa is histidine, tyrosine, serine, methionine, or an amino acid residue which is covalently linked to another amino acid residue of the sequence
  MISC_FEATURE (7)..(7): Xaa is glutamine, asparagine, methionine, serine, or an amino acid which is covalently linked to another amino acid residue of the sequence
  MISC_FEATURE (8)..(8): Xaa is lysine, arginine, or an amino acid residue which is covalently linked to another amino acid residue of the sequence
  MISC_FEATURE (9)..(9): Xaa is leucine, isoleucine, valine, phenylalanine, methionine, or an amino acid residue which is covalently linked to another amino acid residue of the sequence
  MISC_FEATURE (10)..(10): Xaa is valine, leucine, isoleucine, alanine, methionine, or an amino acid residue which is covalently linked to another amino acid residue of the sequence
  MISC_FEATURE (11)..(11): Xaa is phenylalanine, tyrosine, valine, leucine, isoleucine, methionine, or an amino acid residue which is covalently linked to another amino acid residue of the sequence
  MISC_FEATURE (12)..(12): Xaa is phenylalanine, tyrosine, valine, leucine, isoleucine, methionine, or an amino acid residue which is covalently linked to another amino acid residue of the sequence
  MISC_FEATURE (16)..(16): Xaa is valine, leucine, isoleucine, alanine, methionine, or an amino acid residue which is covalently linked to another amino acid residue of the sequence
  MISC_FEATURE (17)..(17): Xaa is glycine, alanine, serine, or an amino acid residue which is covalently linked to another amino acid residue of the sequence
  MISC_FEATURE (18)..(18): Xaa is serine, glycine, alanine, threonine, or an amino acid residue which is covalently linked to another amino acid residue of the sequence
  MISC_FEATURE (19)..(19): Xaa is asparagine, glutamine, methionine, or an amino acid residue which is covalently linked to another amino acid residue of the sequence
  MISC_FEATURE (20)..(20): Xaa is lysine, arginine, or an amino acid residue which is covalently linked to another amino acid residue of the sequence
  MISC_FEATURE (21)..(21): Xaa is glycine, alanine, serine, or an amino acid residue which is covalently linked to another amino acid residue of the sequence
  MISC_FEATURE (22)..(22): Xaa is alanine, valine, glycine, serine, or an amino acid residue which is covalently linked to another amino acid residue of the sequence
  MISC_FEATURE (23)..(23): Xaa is isoleucine, leucine, valine, phenylalanine, methionine, or an amino acid residue which is covalently linked to another amino acid residue of the sequence
  MISC_FEATURE (24)..(24): Xaa is isoleucine, leucine, valine, phenylalanine, methionine, or an amino acid residue which is covalently linked to another amino acid residue of the sequence
  MISC_FEATURE (25)..(25): Xaa is glycine, alanine, serine, or an amino acid residue which is covalently linked to another amino acid residue of the sequence
  MISC_FEATURE (26)..(26): Xaa is leucine, isoleucine, valine, phenylalanine, methionine, or an amino acid residue which is covalently linked to another amino acid residue of the sequence
  MISC_FEATURE (27)..(27): Xaa is methionine, valine, leucine, isoleucine, alanine, or an amino acid residue which is covalently linked to another amino acid residue of the sequence
  MISC_FEATURE (28)..(28): Xaa is valine, leucine, isoleucine, alanine, methionine, or an amino acid residue which is covalently linked to another amino acid residue of the sequence
  MISC_FEATURE (29)..(29): Xaa is glycine, alanine, serine, or an amino acid residue which is covalently linked to another amino acid residue of the sequence
  MISC_FEATURE (30)..(30): Xaa is glycine, alanine, serine, or an amino acid residue which is covalently linked to another amino acid residue of the sequence
  MISC_FEATURE (31)..(31): Xaa is valine, leucine, isoleucine, alanine, methionine, or an amino acid residue which is covalently linked to another amino acid residue of the sequence
GYEXXXXXXXXXAEDXXXXXXXXXXXXXXXXV

SEQ ID NO: 769 - protein, 31 aa, Artificial Sequence
  synthetic
  MISC_FEATURE (3)..(3): Xaa is valine, leucine, isoleucine, alanine, methionine, or an amino acid residue which is covalently linked to another amino acid residue of the sequence
  MISC_FEATURE (4)..(4): Xaa is histidine, tyrosine, serine, methionine, or an amino acid residue which is covalently linked to another amino acid residue of the sequence
  MISC_FEATURE (5)..(5): Xaa is histidine, tyrosine, serine, methionine, or an amino acid residue which is covalently linked to another amino acid residue of the sequence
  MISC_FEATURE (6)..(6): Xaa is glutamine, asparagine, methionine, serine, or an amino acid which is covalently linked to another amino acid residue of the sequence
  MISC_FEATURE (7)..(7): Xaa is lysine, arginine, or an amino acid residue which is covalently linked to another amino acid residue of the sequence
  MISC_FEATURE (8)..(8): Xaa is leucine, isoleucine, valine, phenylalanine, methionine, or an amino acid residue which is covalently linked to another amino acid residue of the sequence
  MISC_FEATURE (9)..(9): Xaa is valine, leucine, isoleucine, alanine, methionine, or an amino acid residue which is covalently linked to another amino acid residue of the sequence
  MISC_FEATURE (10)..(10): Xaa is phenylalanine, tyrosine, valine, leucine, isoleucine, methionine, or an amino acid residue which is covalently linked to another amino acid residue of the sequence
  MISC_FEATURE (11)..(11): Xaa is phenylalanine, tyrosine, valine, leucine, isoleucine, methionine, or an amino acid residue which is covalently linked to another amino acid residue of the sequence
  MISC_FEATURE (15)..(15): Xaa is valine, leucine, isoleucine, alanine, methionine, or an amino acid residue which is covalently linked to another amino acid residue of the sequence
  MISC_FEATURE (16)..(16): Xaa is glycine, alanine, serine, or an amino acid residue which is covalently linked to another amino acid residue of the sequence
  MISC_FEATURE (17)..(17): Xaa is serine, glycine, alanine, threonine, or an amino acid residue which is covalently linked to another amino acid residue of the sequence
  MISC_FEATURE (18)..(18): Xaa is asparagine, glutamine, methionine, or an amino acid residue which is covalently linked to another amino acid residue of the sequence
  MISC_FEATURE (19)..(19): Xaa is lysine, arginine, or an amino acid residue which is covalently linked to another amino acid residue of the sequence
  MISC_FEATURE (20)..(20): Xaa is glycine, alanine, serine, or an amino acid residue which is covalently linked to another amino acid residue of the sequence
  MISC_FEATURE (21)..(21): Xaa is alanine, valine, glycine, serine, or an amino acid residue which is covalently linked to another amino acid residue of the sequence
  MISC_FEATURE (22)..(22): Xaa is isoleucine, leucine, valine, phenylalanine, methionine, or an amino acid residue which is covalently linked to another amino acid residue of the sequence
  MISC_FEATURE (23)..(23): Xaa is isoleucine, leucine, valine, phenylalanine, methionine, or an amino acid residue which is covalently linked to another amino acid residue of the sequence
  MISC_FEATURE (24)..(24): Xaa is glycine, alanine, serine, or an amino acid residue which is covalently linked to another amino acid residue of the sequence
  MISC_FEATURE (25)..(25): Xaa is leucine, isoleucine, valine, phenylalanine, methionine, or an amino acid residue which is covalently linked to another amino acid residue of the sequence
  MISC_FEATURE (26)..(26): Xaa is methionine, valine, leucine, isoleucine, alanine, or an amino acid residue which is covalently linked to another amino acid residue of the sequence
  MISC_FEATURE (27)..(27): Xaa is valine, leucine, isoleucine, alanine, methionine, or an amino acid residue which is covalently linked to another amino acid residue of the sequence
  MISC_FEATURE (28)..(28): Xaa is glycine, alanine, serine, or an amino acid residue which is covalently linked to another amino acid residue of the sequence
  MISC_FEATURE (29)..(29): Xaa is glycine, alanine, serine, or an amino acid residue which is covalently linked to another amino acid residue of the sequence
  MISC_FEATURE (30)..(30): Xaa is valine, leucine, isoleucine, alanine, methionine, or an amino acid residue which is covalently linked to another amino acid residue of the sequence
YEXXXXXXXXXAEDXXXXXXXXXXXXXXXXV

SEQ ID NO: 770 - protein, 30 aa, Artificial Sequence
  synthetic
  MISC_FEATURE (2)..(2): Xaa is valine, leucine, isoleucine, alanine, methionine, or an amino acid residue which is covalently linked to another amino acid residue of the sequence
  MISC_FEATURE (3)..(3): Xaa is histidine, tyrosine, serine, methionine, or an amino acid residue which is covalently linked to another amino acid residue of the sequence
  MISC_FEATURE (4)..(4): Xaa is histidine, tyrosine, serine, methionine, or an amino acid residue which is covalently linked to another amino acid residue of the sequence
  MISC_FEATURE (5)..(5): Xaa is glutamine, asparagine, methionine, serine, or an amino acid which is covalently linked to another amino acid residue of the sequence
  MISC_FEATURE (6)..(6): Xaa is lysine, arginine, or an amino acid residue which is covalently linked to another amino acid residue of the sequence
  MISC_FEATURE (7)..(7): Xaa is leucine, isoleucine, valine, phenylalanine, methionine, or an amino acid residue which is covalently linked to another amino acid residue of the sequence
  MISC_FEATURE (8)..(8): Xaa is valine, leucine, isoleucine, alanine, methionine, or an amino acid residue which is covalently linked to another amino acid residue of the sequence
  MISC_FEATURE (9)..(9): Xaa is phenylalanine, tyrosine, valine, leucine, isoleucine, methionine, or an amino acid residue which is covalently linked to another amino acid residue of the sequence
  MISC_FEATURE (10)..(10): Xaa is phenylalanine, tyrosine, valine, leucine, isoleucine, methionine, or an amino acid residue which is covalently linked to another amino acid residue of the sequence
  MISC_FEATURE (14)..(14): Xaa is valine, leucine, isoleucine, alanine, methionine, or an amino acid residue which is covalently linked to another amino acid residue of the sequence
  MISC_FEATURE (15)..(15): Xaa is glycine, alanine, serine, or an amino acid residue which is covalently linked to another amino acid residue of the sequence
  MISC_FEATURE (16)..(16): Xaa is serine, glycine, alanine, threonine, or an amino acid residue which is covalently linked to another amino acid residue of the sequence
  MISC_FEATURE (17)..(17): Xaa is asparagine, glutamine, methionine, or an amino acid residue which is covalently linked to another amino acid residue of the sequence
  MISC_FEATURE (18)..(18): Xaa is lysine, arginine, or an amino acid residue which is covalently linked to another amino acid residue of the sequence
  MISC_FEATURE (19)..(19): Xaa is glycine, alanine, serine, or an amino acid residue which is covalently linked to another amino acid residue of the sequence
  MISC_FEATURE (20)..(20): Xaa is alanine, valine, glycine, serine, or an amino acid residue which is covalently linked to another amino acid residue of the sequence
  MISC_FEATURE (21)..(21): Xaa is isoleucine, leucine, valine, phenylalanine, methionine, or an amino acid residue which is covalently linked to another amino acid residue of the sequence
  MISC_FEATURE (22)..(22): Xaa is isoleucine, leucine, valine, phenylalanine, methionine, or an amino acid residue which is covalently linked to another amino acid residue of the sequence
  MISC_FEATURE (23)..(23): Xaa is glycine, alanine, serine, or an amino acid residue which is covalently linked to another amino acid residue of the sequence
  MISC_FEATURE (24)..(24): Xaa is leucine, isoleucine, valine, phenylalanine, methionine, or an amino acid residue which is covalently linked to another amino acid residue of the sequence
  MISC_FEATURE (25)..(25): Xaa is methionine, valine, leucine, isoleucine, alanine, or an amino acid residue which is covalently linked to another amino acid residue of the sequence
  MISC_FEATURE (26)..(26): Xaa is valine, leucine, isoleucine, alanine, methionine, or an amino acid residue which is covalently linked to another amino acid residue of the sequence
  MISC_FEATURE (27)..(27): Xaa is glycine, alanine, serine, or an amino acid residue which is covalently linked to another amino acid residue of the sequence
  MISC_FEATURE (28)..(28): Xaa is glycine, alanine, serine, or an amino acid residue which is covalently linked to another amino acid residue of the sequence
  MISC_FEATURE (29)..(29): Xaa is valine, leucine, isoleucine, alanine, methionine, or an amino acid residue which is covalently linked to another amino acid residue of the sequence
EXXXXXXXXXAEDXXXXXXXXXXXXXXXXV

SEQ ID NO: 771 - protein, 29 aa, Artificial Sequence
  synthetic
  MISC_FEATURE (1)..(1): Xaa is valine, leucine, isoleucine, alanine, methionine, or an amino acid residue which is covalently linked to another amino acid residue of the sequence
  MISC_FEATURE (2)..(2): Xaa is histidine, tyrosine, serine, methionine, or an amino acid residue which is covalently linked to another amino acid residue of the sequence
  MISC_FEATURE (3)..(3): Xaa is histidine, tyrosine, serine, methionine, or an amino acid residue which is covalently linked to another amino acid residue of the sequence
  MISC_FEATURE (4)..(4): Xaa is glutamine, asparagine, methionine, serine, or an amino acid which is covalently linked to another amino acid residue of the sequence
  MISC_FEATURE (5)..(5): Xaa is lysine, arginine, or an amino acid residue which is covalently linked to another amino acid residue of the sequence
  MISC_FEATURE (6)..(6): Xaa is leucine, isoleucine, valine, phenylalanine, methionine, or an amino acid residue which is covalently linked to another amino acid residue of the sequence
  MISC_FEATURE (7)..(7): Xaa is valine, leucine, isoleucine, alanine, methionine, or an amino acid residue which is covalently linked to another amino acid residue of the sequence
  MISC_FEATURE (8)..(8): Xaa is phenylalanine, tyrosine, valine, leucine, isoleucine, methionine, or an amino acid residue which is covalently linked to another amino acid residue of the sequence
  MISC_FEATURE (9)..(9): Xaa is phenylalanine, tyrosine, valine, leucine, isoleucine, methionine, or an amino acid residue which is covalently linked to another amino acid residue of the sequence
  MISC_FEATURE (13)..(13): Xaa is valine, leucine, isoleucine, alanine, methionine, or an amino acid residue which is covalently linked to another amino acid residue of the sequence
  MISC_FEATURE (14)..(14): Xaa is glycine, alanine, serine, or an amino acid residue which is covalently linked to another amino acid residue of the sequence
  MISC_FEATURE (15)..(15): Xaa is serine, glycine, alanine, threonine, or an amino acid residue which is covalently linked to another amino acid residue of the sequence
  MISC_FEATURE (16)..(16): Xaa is asparagine, glutamine, methionine, or an amino acid residue which is covalently linked to another amino acid residue of the sequence
  MISC_FEATURE (17)..(17): Xaa is lysine, arginine, or an amino acid residue which is covalently linked to another amino acid residue of the sequence
  MISC_FEATURE (18)..(18): Xaa is glycine, alanine, serine, or an amino acid residue which is covalently linked to another amino acid residue of the sequence
  MISC_FEATURE (19)..(19): Xaa is alanine, valine, glycine, serine, or an amino acid residue which is covalently linked to another amino acid residue of the sequence
  MISC_FEATURE (20)..(20): Xaa is isoleucine, leucine, valine, phenylalanine, methionine, or an amino acid residue which is covalently linked to another amino acid residue of the sequence
  MISC_FEATURE (21)..(21): Xaa is isoleucine, leucine, valine, phenylalanine, methionine, or an amino acid residue which is covalently linked to another amino acid residue of the sequence
  MISC_FEATURE (22)..(22): Xaa is glycine, alanine, serine, or an amino acid residue which is covalently linked to another amino acid residue of the sequence
  MISC_FEATURE (23)..(23): Xaa is leucine, isoleucine, valine, phenylalanine, methionine, or an amino acid residue which is covalently linked to another amino acid residue of the sequence
  MISC_FEATURE (24)..(24): Xaa is methionine, valine, leucine, isoleucine, alanine, or an amino acid residue which is covalently linked to another amino acid residue of the sequence
  MISC_FEATURE (25)..(25): Xaa is valine, leucine, isoleucine, alanine, methionine, or an amino acid residue which is covalently linked to another amino acid residue of the sequence
  MISC_FEATURE (26)..(26): Xaa is glycine, alanine, serine, or an amino acid residue which is covalently linked to another amino acid residue of the sequence
  MISC_FEATURE (27)..(27): Xaa is glycine, alanine, serine, or an amino acid residue which is covalently linked to another amino acid residue of the sequence
  MISC_FEATURE (28)..(28): Xaa is valine, leucine, isoleucine, alanine, methionine, or an amino acid residue which is covalently linked to another amino acid residue of the sequence
XXXXXXXXXAEDXXXXXXXXXXXXXXXXV

SEQ ID NO: 772 - protein, 28 aa, Artificial Sequence
  synthetic
  MISC_FEATURE (1)..(1): Xaa is histidine, tyrosine, serine, methionine, or an amino acid residue which is covalently linked to another amino acid residue of the sequence
  MISC_FEATURE (2)..(2): Xaa is histidine, tyrosine, serine, methionine, or an amino acid residue which is covalently linked to another amino acid residue of the sequence
  MISC_FEATURE (3)..(3): Xaa is glutamine, asparagine, methionine, serine, or an amino acid which is covalently linked to another amino acid residue of the sequence
  MISC_FEATURE (4)..(4): Xaa is lysine, arginine, or an amino acid residue which is covalently linked to another amino acid residue of the sequence
  MISC_FEATURE (5)..(5): Xaa is leucine, isoleucine, valine, phenylalanine, methionine, or an amino acid residue which is covalently linked to another amino acid residue of the sequence
  MISC_FEATURE (6)..(6): Xaa is valine, leucine, isoleucine, alanine, methionine, or an amino acid residue which is covalently linked to another amino acid residue of the sequence
  MISC_FEATURE (7)..(7): Xaa is phenylalanine, tyrosine, valine, leucine, isoleucine, methionine, or an amino acid residue which is covalently linked to another amino acid residue of the sequence
  MISC_FEATURE (8)..(8): Xaa is phenylalanine, tyrosine, valine, leucine, isoleucine, methionine, or an amino acid residue which is covalently linked to another amino acid residue of the sequence
  MISC_FEATURE (12)..(12): Xaa is valine, leucine, isoleucine, alanine, methionine, or an amino acid residue which is covalently linked to another amino acid residue of the sequence
  MISC_FEATURE (13)..(13): Xaa is glycine, alanine, serine, or an amino acid residue which is covalently linked to another amino acid residue of the sequence
  MISC_FEATURE (14)..(14): Xaa is serine, glycine, alanine, threonine, or an amino acid residue which is covalently linked to another amino acid residue of the sequence
  MISC_FEATURE (15)..(15): Xaa is asparagine, glutamine, methionine, or an amino acid residue which is covalently linked to another amino acid residue of the sequence
  MISC_FEATURE (16)..(16): Xaa is lysine, arginine, or an amino acid residue which is covalently linked to another amino acid residue of the sequence
  MISC_FEATURE (17)..(17): Xaa is glycine, alanine, serine, or an amino acid residue which is covalently linked to another amino acid residue of the sequence
  MISC_FEATURE (18)..(18): Xaa is alanine, valine, glycine, serine, or an amino acid residue which is covalently linked to another amino acid residue of the sequence
  MISC_FEATURE (19)..(19): Xaa is isoleucine, leucine, valine, phenylalanine, methionine, or an amino acid residue which is covalently linked to another amino acid residue of the sequence
  MISC_FEATURE (20)..(20): Xaa is isoleucine, leucine, valine, phenylalanine, methionine, or an amino acid residue which is covalently linked to another amino acid residue of the sequence
  MISC_FEATURE (21)..(21): Xaa is glycine, alanine, serine, or an amino acid residue which is covalently linked to another amino acid residue of the sequence
  MISC_FEATURE (22)..(22): Xaa is leucine, isoleucine, valine, phenylalanine, methionine, or an amino acid residue which is covalently linked to another amino acid residue of the sequence
  MISC_FEATURE (23)..(23): Xaa is methionine, valine, leucine, isoleucine, alanine, or an amino acid residue which is covalently linked to another amino acid residue of the sequence
  MISC_FEATURE (24)..(24): Xaa is valine, leucine, isoleucine, alanine, methionine, or an amino acid residue which is covalently linked to another amino acid residue of the sequence
  MISC_FEATURE (25)..(25): Xaa is glycine, alanine, serine, or an amino acid residue which is covalently linked to another amino acid residue of the sequence
  MISC_FEATURE (26)..(26): Xaa is glycine, alanine, serine, or an amino acid residue which is covalently linked to another amino acid residue of the sequence
XXXXXXXXAEDXXXXXXXXXXXXXXXVV

SEQ ID NO: 773 - protein, 27 aa, Artificial Sequence
  synthetic
  MISC_FEATURE (1)..(1): Xaa is histidine, tyrosine, serine, methionine, or an amino acid residue which is covalently linked to another amino acid residue of the sequence
  MISC_FEATURE (2)..(2): Xaa is glutamine, asparagine, methionine, serine, or an amino acid which is covalently linked to another amino acid residue of the sequence
  MISC_FEATURE (3)..(3): Xaa is lysine, arginine, or an amino acid residue which is covalently linked to another amino acid residue of the sequence
  MISC_FEATURE (4)..(4): Xaa is leucine, isoleucine, valine, phenylalanine, methionine, or an amino acid residue which is covalently linked to another amino acid residue of the sequence
  MISC_FEATURE (5)..(5): Xaa is valine, leucine, isoleucine, alanine, methionine, or an amino acid residue which is covalently linked to another amino acid residue of the sequence
  MISC_FEATURE (6)..(6): Xaa is phenylalanine, tyrosine, valine, leucine, isoleucine, methionine, or an amino acid residue which is covalently linked to another amino acid residue of the sequence
  MISC_FEATURE (7)..(7): Xaa is phenylalanine, tyrosine, valine, leucine, isoleucine, methionine, or an amino acid residue which is covalently linked to another amino acid residue of the sequence
  MISC_FEATURE (11)..(11): Xaa is valine, leucine, isoleucine, alanine, methionine, or an amino acid residue which is covalently linked to another amino acid residue of the sequence
  MISC_FEATURE (12)..(12): Xaa is glycine, alanine, serine, or an amino acid residue which is covalently linked to another amino acid residue of the sequence
  MISC_FEATURE (13)..(13): Xaa is serine, glycine, alanine, threonine, or an amino acid residue which is covalently linked to another amino acid residue of the sequence
  MISC_FEATURE (14)..(14): Xaa is asparagine, glutamine, methionine, or an amino acid residue which is covalently linked to another amino acid residue of the sequence
  MISC_FEATURE (15)..(15): Xaa is lysine, arginine, or an amino acid residue which is covalently linked to another amino acid residue of the sequence
  MISC_FEATURE (16)..(16): Xaa is glycine, alanine, serine, or an amino acid residue which is covalently linked to another amino acid residue of the sequence
  MISC_FEATURE (17)..(17): Xaa is alanine, valine, glycine, serine, or an amino acid residue which is covalently linked to another amino acid residue of the sequence
  MISC_FEATURE (18)..(18): Xaa is isoleucine, leucine, valine, phenylalanine, methionine, or an amino acid residue which is covalently linked to another amino acid residue of the sequence
  MISC_FEATURE (19)..(19): Xaa is isoleucine, leucine, valine, phenylalanine, methionine, or an amino acid residue which is covalently linked to another amino acid residue of the sequence
  MISC_FEATURE (20)..(20): Xaa is glycine, alanine, serine, or an amino acid residue which is covalently linked to another amino acid residue of the sequence
  MISC_FEATURE (21)..(21): Xaa is leucine, isoleucine, valine, phenylalanine, methionine, or an amino acid residue which is covalently linked to another amino acid residue of the sequence
  MISC_FEATURE (22)..(22): Xaa is methionine, valine, leucine, isoleucine, alanine, or an amino acid residue which is covalently linked to another amino acid residue of the sequence
  MISC_FEATURE (23)..(23): Xaa is valine, leucine, isoleucine, alanine, methionine, or an amino acid residue which is covalently linked to another amino acid residue of the sequence
  MISC_FEATURE (24)..(24): Xaa is glycine, alanine, serine, or an amino acid residue which is covalently linked to another amino acid residue of the sequence
XXXXXXXAEDXXXXXXXXXXXXXXGVV

SEQ ID NO: 774 - protein, 26 aa, Artificial Sequence
  synthetic
  MISC_FEATURE (1)..(1): Xaa is glutamine, asparagine, methionine, serine, or an amino acid which is covalently linked to another amino acid residue of the sequence
  MISC_FEATURE (2)..(2): Xaa is lysine, arginine, or an amino acid residue which is covalently linked to another amino acid residue of the sequence
  MISC_FEATURE (3)..(3): Xaa is leucine, isoleucine, valine, phenylalanine, methionine, or an amino acid residue which is covalently linked to another amino acid residue of the sequence
  MISC_FEATURE (4)..(4): Xaa is valine, leucine, isoleucine, alanine, methionine, or an amino acid residue which is covalently linked to another amino acid residue of the sequence
  MISC_FEATURE (5)..(5): Xaa is phenylalanine, tyrosine, valine, leucine, isoleucine, methionine, or an amino acid residue which is covalently linked to another amino acid residue of the sequence
  MISC_FEATURE (6)..(6): Xaa is phenylalanine, tyrosine, valine, leucine, isoleucine, methionine, or an amino acid residue which is covalently linked to another amino acid residue of the sequence
  MISC_FEATURE (10)..(10): Xaa is valine, leucine, isoleucine, alanine, methionine, or an amino acid residue which is covalently linked to another amino acid residue of the sequence
  MISC_FEATURE (11)..(11): Xaa is glycine, alanine, serine, or an amino acid residue which is covalently linked to another amino acid residue of the sequence
  MISC_FEATURE (12)..(12): Xaa is serine, glycine, alanine, threonine, or an amino acid residue which is covalently linked to another amino acid residue of the sequence
  MISC_FEATURE (13)..(13): Xaa is asparagine, glutamine, methionine, or an amino acid residue which is covalently linked to another amino acid residue of the sequence
  MISC_FEATURE (14)..(14): Xaa is lysine, arginine, or an amino acid residue which is covalently linked to another amino acid residue of the sequence
  MISC_FEATURE (15)..(15): Xaa is glycine, alanine, serine, or an amino acid residue which is covalently linked to another amino acid residue of the sequence
  MISC_FEATURE (16)..(16): Xaa is alanine, valine, glycine, serine, or an amino acid residue which is covalently linked to another amino acid residue of the sequence
  MISC_FEATURE (17)..(17): Xaa is isoleucine, leucine, valine, phenylalanine, methionine, or an amino acid residue which is covalently linked to another amino acid residue of the sequence
  MISC_FEATURE (18)..(18): Xaa is isoleucine, leucine, valine, phenylalanine, methionine, or an amino acid residue which is covalently linked to another amino acid residue of the sequence
  MISC_FEATURE (19)..(19): Xaa is glycine, alanine, serine, or an amino acid residue which is covalently linked to another amino acid residue of the sequence
  MISC_FEATURE (20)..(20): Xaa is leucine, isoleucine, valine, phenylalanine, methionine, or an amino acid residue which is covalently linked to another amino acid residue of the sequence
  MISC_FEATURE (21)..(21): Xaa is methionine, valine, leucine, isoleucine, alanine, or an amino acid residue which is covalently linked to another amino acid residue of the sequence
  MISC_FEATURE (22)..(22): Xaa is valine, leucine, isoleucine, alanine, methionine, or an amino acid residue which is covalently linked to another amino acid residue of the sequence
XXXXXXAEDXXXXXXXXXXXXXGGVV

SEQ ID NO: 775 - protein, 25 aa, Artificial Sequence
  synthetic
  MISC_FEATURE (1)..(1): Xaa is lysine, arginine, or an amino acid residue which is covalently linked to another amino acid residue of the sequence
  MISC_FEATURE (2)..(2): Xaa is leucine, isoleucine, valine, phenylalanine, methionine, or an amino acid residue which is covalently linked to another amino acid residue of the sequence
  MISC_FEATURE (3)..(3): Xaa is valine, leucine, isoleucine, alanine, methionine, or an amino acid residue which is covalently linked to another amino acid residue of the sequence
  MISC_FEATURE (4)..(4): Xaa is phenylalanine, tyrosine, valine, leucine, isoleucine, methionine, or an amino acid residue which is covalently linked to another amino acid residue of the sequence
  MISC_FEATURE (5)..(5): Xaa is phenylalanine, tyrosine, valine, leucine, isoleucine, methionine, or an amino acid residue which is covalently linked to another amino acid residue of the sequence
  MISC_FEATURE (9)..(9): Xaa is valine, leucine, isoleucine, alanine, methionine, or an amino acid residue which is covalently linked to another amino acid residue of the sequence
  MISC_FEATURE (10)..(10): Xaa is glycine, alanine, serine, or an amino acid residue which is covalently linked to another amino acid residue of the sequence
  MISC_FEATURE (11)..(11): Xaa is serine, glycine, alanine, threonine, or an amino acid residue which is covalently linked to another amino acid residue of the sequence
  MISC_FEATURE (12)..(12): Xaa is asparagine, glutamine, methionine, or an amino acid residue which is covalently linked to another amino acid residue of the sequence
  MISC_FEATURE (13)..(13): Xaa is lysine, arginine, or an amino acid residue which is covalently linked to another amino acid residue of the sequence
  MISC_FEATURE (14)..(14): Xaa is glycine, alanine, serine, or an amino acid residue which is covalently linked to another amino acid residue of the sequence
  MISC_FEATURE (15)..(15): Xaa is alanine, valine, glycine, serine, or an amino acid residue which is covalently linked to another amino acid residue of the sequence
  MISC_FEATURE (16)..(16): Xaa is isoleucine, leucine, valine, phenylalanine, methionine, or an amino acid residue which is covalently linked to another amino acid residue of the sequence
  MISC_FEATURE (17)..(17): Xaa is isoleucine, leucine, valine, phenylalanine, methionine, or an amino acid residue which is covalently linked to another amino acid residue of the sequence
  MISC_FEATURE (18)..(18): Xaa is glycine, alanine, serine, or an amino acid residue which is covalently linked to another amino acid residue of the sequence
  MISC_FEATURE (19)..(19): Xaa is leucine, isoleucine, valine, phenylalanine, methionine, or an amino acid residue which is covalently linked to another amino acid residue of the sequence
  MISC_FEATURE (20)..(20): Xaa is methionine, valine, leucine, isoleucine, alanine, or an amino acid residue which is covalently linked to another amino acid residue of the sequence
XXXXXAEDXXXXXXXXXXXXVGGVV

SEQ ID NO: 776 - protein, 24 aa, Artificial Sequence
  synthetic
  MISC_FEATURE (1)..(1): Xaa is leucine, isoleucine, valine, phenylalanine, methionine, or an amino acid residue which is covalently linked to another amino acid residue of the sequence
  MISC_FEATURE (2)..(2): Xaa is valine, leucine, isoleucine, alanine, methionine, or an amino acid residue which is covalently linked to another amino acid residue of the sequence
  MISC_FEATURE (3)..(3): Xaa is phenylalanine, tyrosine, valine, leucine, isoleucine, methionine, or an amino acid residue which is covalently linked to another amino acid residue of the sequence
  MISC_FEATURE (4)..(4): Xaa is phenylalanine, tyrosine, valine, leucine, isoleucine, methionine, or an amino acid residue which is covalently linked to another amino acid residue of the sequence
  MISC_FEATURE (8)..(8): Xaa is valine, leucine, isoleucine, alanine, methionine, or an amino acid residue which is covalently linked to another amino acid residue of the sequence
  MISC_FEATURE (9)..(9): Xaa is glycine, alanine, serine, or an amino acid residue which is covalently linked to another amino acid residue of the sequence
  MISC_FEATURE (10)..(10): Xaa is serine, glycine, alanine, threonine, or an amino acid residue which is covalently linked to another amino acid residue of the sequence
  MISC_FEATURE (11)..(11): Xaa is asparagine, glutamine, methionine, or an amino acid residue which is covalently linked to another amino acid residue of the sequence
  MISC_FEATURE (12)..(12): Xaa is lysine, arginine, or an amino acid residue which is covalently linked to another amino acid residue of the sequence
  MISC_FEATURE (13)..(13): Xaa is glycine, alanine, serine, or an amino acid residue which is covalently linked to another amino acid residue of the sequence
  MISC_FEATURE (14)..(14): Xaa is alanine, valine, glycine, serine, or an amino acid residue which is covalently linked to another amino acid residue of the sequence
  MISC_FEATURE (15)..(15): Xaa is isoleucine, leucine, valine, phenylalanine, methionine, or an amino acid residue which is covalently linked to another amino acid residue of the sequence
  MISC_FEATURE (16)..(16): Xaa is isoleucine, leucine, valine, phenylalanine, methionine, or an amino acid residue which is covalently linked to another amino acid residue of the sequence
  MISC_FEATURE (17)..(17): Xaa is glycine, alanine, serine, or an amino acid residue which is covalently linked to another amino acid residue of the sequence
  MISC_FEATURE (18)..(18): Xaa is leucine, isoleucine, valine, phenylalanine, methionine, or an amino acid residue which is covalently linked to another amino acid residue of the sequence
XXXXAEDXXXXXXXXXXXMVGGVV

SEQ ID NO: 777 - protein, 23 aa, Artificial Sequence
  synthetic
  MISC_FEATURE (1)..(1): Xaa is valine, leucine, isoleucine, alanine, methionine, or an amino acid residue which is covalently linked to another amino acid residue of the sequence
  MISC_FEATURE (2)..(2): Xaa is phenylalanine, tyrosine, valine, leucine, isoleucine, methionine, or an amino acid residue which is covalently linked to another amino acid residue of the sequence
  MISC_FEATURE (3)..(3): Xaa is phenylalanine, tyrosine, valine, leucine, isoleucine, methionine, or an amino acid residue which is covalently linked to another amino acid residue of the sequence
  MISC_FEATURE (7)..(7): Xaa is valine, leucine, isoleucine, alanine, methionine, or an amino acid residue which is covalently linked to another amino acid residue of the sequence
  MISC_FEATURE (8)..(8): Xaa is glycine, alanine, serine, or an amino acid residue which is covalently linked to another amino acid residue of the sequence
  MISC_FEATURE (9)..(9): Xaa is serine, glycine, alanine, threonine, or an amino acid residue which is covalently linked to another amino acid residue of the sequence
  MISC_FEATURE (10)..(10): Xaa is asparagine, glutamine, methionine, or an amino acid residue which is covalently linked to another amino acid residue of the sequence
  MISC_FEATURE (11)..(11): Xaa is lysine, arginine, or an amino acid residue which is covalently linked to another amino acid residue of the sequence
  MISC_FEATURE (12)..(12): Xaa is glycine, alanine, serine, or an amino acid residue which is covalently linked to another amino acid residue of the sequence
  MISC_FEATURE (13)..(13): Xaa is alanine, valine, glycine, serine, or an amino acid residue which is covalently linked to another amino acid residue of the sequence
  MISC_FEATURE (14)..(14): Xaa is isoleucine, leucine, valine, phenylalanine, methionine, or an amino acid residue which is covalently linked to another amino acid residue of the sequence
  MISC_FEATURE (15)..(15): Xaa is isoleucine, leucine, valine, phenylalanine, methionine, or an amino acid residue which is covalently linked to another amino acid residue of the sequence
  MISC_FEATURE (16)..(16): Xaa is glycine, alanine, serine, or an amino acid residue which is covalently linked to another amino acid residue of the sequence
XXXAEDXXXXXXXXXXLMVGGVV

SEQ ID NO: 778 - protein, 22 aa, Artificial Sequence
  synthetic
  MISC_FEATURE (1)..(1): Xaa is phenylalanine, tyrosine, valine, leucine, isoleucine, methionine, or an amino acid residue which is covalently linked to another amino acid residue of the sequence
  MISC_FEATURE (2)..(2): Xaa is phenylalanine, tyrosine, valine, leucine, isoleucine, methionine, or an amino acid residue which is covalently linked to another amino acid residue of the sequence
  MISC_FEATURE (6)..(6): Xaa is valine, leucine, isoleucine, alanine, methionine, or an amino acid residue which is covalently linked to another amino acid residue of the sequence
  MISC_FEATURE (7)..(7): Xaa is glycine, alanine, serine, or an amino acid residue which is covalently linked to another amino acid residue of the sequence
  MISC_FEATURE (8)..(8): Xaa is serine, glycine, alanine, threonine, or an amino acid residue which is covalently linked to another amino acid residue of the sequence
  MISC_FEATURE (9)..(9): Xaa is asparagine, glutamine, methionine, or an amino acid residue which is covalently linked to another amino acid residue of the sequence
  MISC_FEATURE (10)..(10): Xaa is lysine, arginine, or an amino acid residue which is covalently linked to another amino acid residue of the sequence
  MISC_FEATURE (11)..(11): Xaa is glycine, alanine, serine, or an amino acid residue which is covalently linked to another amino acid residue of the sequence
  MISC_FEATURE (12)..(12): Xaa is alanine, valine, glycine, serine, or an amino acid residue which is covalently linked to another amino acid residue of the sequence
  MISC_FEATURE (13)..(13): Xaa is isoleucine, leucine, valine, phenylalanine, methionine, or an amino acid residue which is covalently linked to another amino acid residue of the sequence
  MISC_FEATURE (14)..(14): Xaa is isoleucine, leucine, valine, phenylalanine, methionine, or an amino acid residue which is covalently linked to another amino acid residue of the sequence
XXAEDXXXXXXXXXGLMVGGVV

SEQ ID NO: 779 - protein, 21 aa, Artificial Sequence
  synthetic
  MISC_FEATURE (1)..(1): Xaa is phenylalanine, tyrosine, valine, leucine, isoleucine, methionine, or an amino acid residue which is covalently linked to another amino acid residue of the sequence
  MISC_FEATURE (5)..(5): Xaa is valine, leucine, isoleucine, alanine, methionine, or an amino acid residue which is covalently linked to another amino acid residue of the sequence
  MISC_FEATURE (6)..(6): Xaa is glycine, alanine, serine, or an amino acid residue which is covalently linked to another amino acid residue of the sequence
  MISC_FEATURE (7)..(7): Xaa is serine, glycine, alanine, threonine, or an amino acid residue which is covalently linked to another amino acid residue of the sequence
  MISC_FEATURE (8)..(8): Xaa is asparagine, glutamine, methionine, or an amino acid residue which is covalently linked to another amino acid residue of the sequence
  MISC_FEATURE (9)..(9): Xaa is lysine, arginine, or an amino acid residue which is covalently linked to another amino acid residue of the sequence
  MISC_FEATURE (10)..(10): Xaa is glycine, alanine, serine, or an amino acid residue which is covalently linked to another amino acid residue of the sequence
  MISC_FEATURE (11)..(11): Xaa is alanine, valine, glycine, serine, or an amino acid residue which is covalently linked to another amino acid residue of the sequence
  MISC_FEATURE (12)..(12): Xaa is isoleucine, leucine, valine, phenylalanine, methionine, or an amino acid residue which is covalently linked to another amino acid residue of the sequence
  MISC_FEATURE (32)..(32): Xaa is isoleucine, leucine, valine, phenylalanine, methionine, or an amino acid residue which is covalently linked to another amino acid residue of the sequence
XAEDXXXXXXXXIGLMVGGVV

SEQ ID NO: 780 - protein, 39 aa, Artificial Sequence
  synthetic
  MISC_FEATURE (12)..(12): Xaa is valine, leucine, isoleucine, alanine, methionine, or an amino acid residue which is covalently linked to another amino acid residue of the sequence
  MISC_FEATURE (13)..(13): Xaa is histidine, tyrosine, serine, methionine, or an amino acid residue which is covalently linked to another amino acid residue of the sequence
  MISC_FEATURE (14)..(14): Xaa is histidine, tyrosine, serine, methionine, or an amino acid residue which is covalently linked to another amino acid residue of the sequence
  MISC_FEATURE (15)..(15): Xaa is glutamine, asparagine, methionine, serine, or an amino acid which is covalently linked to another amino acid residue of the sequence
  MISC_FEATURE (16)..(16): Xaa is lysine, arginine, or an amino acid residue which is covalently linked to another amino acid residue of the sequence
  MISC_FEATURE (17)..(17): Xaa is leucine, isoleucine, valine, phenylalanine, methionine, or an amino acid residue which is covalently linked to another amino acid residue of the sequence
  MISC_FEATURE (18)..(18): Xaa is valine, leucine, isoleucine, alanine, methionine, or an amino acid residue which is covalently linked to another amino acid residue of the sequence
  MISC_FEATURE (19)..(19): Xaa is phenylalanine, tyrosine, valine, leucine, isoleucine, methionine, or an amino acid residue which is covalently linked to another amino acid residue of the sequence
  MISC_FEATURE (20)..(20): Xaa is phenylalanine, tyrosine, valine, leucine, isoleucine, methionine, or an amino acid residue which is covalently linked to another amino acid residue of the sequence
  MISC_FEATURE (24)..(24): Xaa is valine, leucine, isoleucine, alanine, methionine, or an amino acid residue which is covalently linked to another amino acid residue of the sequence
  MISC_FEATURE (25)..(25): Xaa is glycine, alanine, serine, or an amino acid residue which is covalently linked to another amino acid residue of the sequence
  MISC_FEATURE (26)..(26): Xaa is serine, glycine, alanine, threonine, or an amino acid residue which is covalently linked to another amino acid residue of the sequence
  MISC_FEATURE (27)..(27): Xaa is asparagine, glutamine, methionine, or an amino acid residue which is covalently linked to another amino acid residue of the sequence
  MISC_FEATURE (28)..(28): Xaa is lysine, arginine, or an amino acid residue which is covalently linked to another amino acid residue of the sequence
  MISC_FEATURE (29)..(29): Xaa is glycine, alanine, serine, or an amino acid residue which is covalently linked to another amino acid residue of the sequence
  MISC_FEATURE (30)..(30): Xaa is alanine, valine, glycine, serine, or an amino acid residue which is covalently linked to another amino acid residue of the sequence
  MISC_FEATURE (31)..(31): Xaa is isoleucine, leucine, valine, phenylalanine, methionine, or an amino acid residue which is covalently linked to another amino acid residue of the sequence
  MISC_FEATURE (32)..(32): Xaa is isoleucine, leucine, valine, phenylalanine, methionine, or an amino acid residue which is covalently linked to another amino acid residue of the sequence
  MISC_FEATURE (33)..(33): Xaa is glycine, alanine, serine, or an amino acid residue which is covalently linked to another amino acid residue of the sequence
  MISC_FEATURE (34)..(34): Xaa is leucine, isoleucine, valine, phenylalanine, methionine, or an amino acid residue which is covalently linked to another amino acid residue of the sequence
  MISC_FEATURE (35)..(35): Xaa is methionine, valine, leucine, isoleucine, alanine, or an amino acid residue which is covalently linked to another amino acid residue of the sequence
  MISC_FEATURE (36)..(36): Xaa is valine, leucine, isoleucine, alanine, methionine, or an amino acid residue which is covalently linked to another amino acid residue of the sequence
  MISC_FEATURE (37)..(37): Xaa is glycine, alanine, serine, or an amino acid residue which is covalently linked to another amino acid residue of the sequence
  MISC_FEATURE (38)..(38): Xaa is glycine, alanine, serine, or an amino acid residue which is covalently linked to another amino acid residue of the sequence
  MISC_FEATURE (39)..(39): Xaa is valine, leucine, isoleucine, alanine, methionine, or an amino acid residue which is covalently linked to another amino acid residue of the sequence
DAEFRHDSGYEXXXXXXXXXAEDXXXXXXXXXXXXXXXX

SEQ ID NO: 781 - protein, 38 aa, Artificial Sequence
  synthetic
  MISC_FEATURE (11)..(11): Xaa is valine, leucine, isoleucine, alanine, methionine, or an amino acid residue which is covalently linked to another amino acid residue of the sequence
  MISC_FEATURE (12)..(12): Xaa is histidine, tyrosine, serine, methionine, or an amino acid residue which is covalently linked to another amino acid residue of the sequence
  MISC_FEATURE (13)..(13): Xaa is histidine, tyrosine, serine, methionine, or an amino acid residue which is covalently linked to another amino acid residue of the sequence
  MISC_FEATURE (14)..(14): Xaa is glutamine, asparagine, methionine, serine, or an amino acid which is covalently linked to another amino acid residue of the sequence
  MISC_FEATURE (15)..(15): Xaa is lysine, arginine, or an amino acid residue which is covalently linked to another amino acid residue of the sequence
  MISC_FEATURE (16)..(16): Xaa is leucine, isoleucine, valine, phenylalanine, methionine, or an amino acid residue which is covalently linked to another amino acid residue of the sequence
  MISC_FEATURE (17)..(17): Xaa is valine, leucine, isoleucine, alanine, methionine, or an amino acid residue which is covalently linked to another amino acid residue of the sequence
  MISC_FEATURE (18)..(18): Xaa is phenylalanine, tyrosine, valine, leucine, isoleucine, methionine, or an amino acid residue which is covalently linked to another amino acid residue of the sequence
  MISC_FEATURE (19)..(19): Xaa is phenylalanine, tyrosine, valine, leucine, isoleucine, methionine, or an amino acid residue which is covalently linked to another amino acid residue of the sequence
  MISC_FEATURE (23)..(23): Xaa is valine, leucine, isoleucine, alanine, methionine, or an amino acid residue which is covalently linked to another amino acid residue of the sequence
  MISC_FEATURE (24)..(24): Xaa is glycine, alanine, serine, or an amino acid residue which is covalently linked to another amino acid residue of the sequence
  MISC_FEATURE (25)..(25): Xaa is serine, glycine, alanine, threonine, or an amino acid residue which is covalently linked to another amino acid residue of the sequence
  MISC_FEATURE (26)..(26): Xaa is asparagine, glutamine, methionine, or an amino acid residue which is covalently linked to another amino acid residue of the sequence
  MISC_FEATURE (27)..(27): Xaa is lysine, arginine, or an amino acid residue which is covalently linked to another amino acid residue of the sequence
  MISC_FEATURE (28)..(28): Xaa is glycine, alanine, serine, or an amino acid residue which is covalently linked to another amino acid residue of the sequence
  MISC_FEATURE (29)..(29): Xaa is alanine, valine, glycine, serine, or an amino acid residue which is covalently linked to another amino acid residue of the sequence
  MISC_FEATURE (30)..(30): Xaa is isoleucine, leucine, valine, phenylalanine, methionine, or an amino acid residue which is covalently linked to another amino acid residue of the sequence
  MISC_FEATURE (31)..(31): Xaa is isoleucine, leucine, valine, phenylalanine, methionine, or an amino acid residue which is covalently linked to another amino acid residue of the sequence
  MISC_FEATURE (32)..(32): Xaa is glycine, alanine, serine, or an amino acid residue which is covalently linked to another amino acid residue of the sequence
  MISC_FEATURE (33)..(33): Xaa is leucine, isoleucine, valine, phenylalanine, methionine, or an amino acid residue which is covalently linked to another amino acid residue of the sequence
  MISC_FEATURE (34)..(34): Xaa is methionine, valine, leucine, isoleucine, alanine, or an amino acid residue which is covalently linked to another amino acid residue of the sequence
  MISC_FEATURE (35)..(35): Xaa is valine, leucine, isoleucine, alanine, methionine, or an amino acid residue which is covalently linked to another amino acid residue of the sequence
  MISC_FEATURE (36)..(36): Xaa is glycine, alanine, serine, or an amino acid residue which is covalently linked to another amino acid residue of the sequence
  MISC_FEATURE (37)..(37): Xaa is glycine, alanine, serine, or an amino acid residue which is covalently linked to another amino acid residue of the sequence
  MISC_FEATURE (38)..(38): Xaa is valine, leucine, isoleucine, alanine, methionine, or an amino acid residue which is covalently linked to another amino acid residue of the sequence
AEFRHDSGYEXXXXXXXXXAEDXXXXXXXXXXXXXXXX

SEQ ID NO: 782 - protein, 37 aa, Artificial Sequence
  synthetic
  MISC_FEATURE (10)..(10): Xaa is valine, leucine, isoleucine, alanine, methionine, or an amino acid residue which is covalently linked to another amino acid residue of the sequence
  MISC_FEATURE (11)..(11): Xaa is histidine, tyrosine, serine, methionine, or an amino acid residue which is covalently linked to another amino acid residue of the sequence
  MISC_FEATURE (12)..(12): Xaa is histidine, tyrosine, serine, methionine, or an amino acid residue which is covalently linked to another amino acid residue of the sequence
  MISC_FEATURE (13)..(13): Xaa is glutamine, asparagine, methionine, serine, or an amino acid which is covalently linked to another amino acid residue of the sequence
  MISC_FEATURE (14)..(14): Xaa is lysine, arginine, or an amino acid residue which is covalently linked to another amino acid residue of the sequence
  MISC_FEATURE (15)..(15): Xaa is leucine, isoleucine, valine, phenylalanine, methionine, or an amino acid residue which is covalently linked to another amino acid residue of the sequence
  MISC_FEATURE (16)..(16): Xaa is valine, leucine, isoleucine, alanine, methionine, or an amino acid residue which is covalently linked to another amino acid residue of the sequence
  MISC_FEATURE (17)..(17): Xaa is phenylalanine, tyrosine, valine, leucine, isoleucine, methionine, or an amino acid residue which is covalently linked to another amino acid residue of the sequence
  MISC_FEATURE (18)..(18): Xaa is phenylalanine, tyrosine, valine, leucine, isoleucine, methionine, or an amino acid residue which is covalently linked to another amino acid residue of the sequence
  MISC_FEATURE (22)..(22): Xaa is valine, leucine, isoleucine, alanine, methionine, or an amino acid residue which is covalently linked to another amino acid residue of the sequence
  MISC_FEATURE (23)..(23): Xaa is glycine, alanine, serine, or an amino acid residue which is covalently linked to another amino acid residue of the sequence
  MISC_FEATURE (24)..(24): Xaa is serine, glycine, alanine, threonine, or an amino acid residue which is covalently linked to another amino acid residue of the sequence
  MISC_FEATURE (25)..(25): Xaa is asparagine, glutamine, methionine, or an amino acid residue which is covalently linked to another amino acid residue of the sequence
  MISC_FEATURE (26)..(26): Xaa is lysine, arginine, or an amino acid residue which is covalently linked to another amino acid residue of the sequence
  MISC_FEATURE (27)..(27): Xaa is glycine, alanine, serine, or an amino acid residue which is covalently linked to another amino acid residue of the sequence
  MISC_FEATURE (28)..(28): Xaa is alanine, valine, glycine, serine, or an amino acid residue which is covalently linked to another amino acid residue of the sequence
  MISC_FEATURE (29)..(29): Xaa is isoleucine, leucine, valine, phenylalanine, methionine, or an amino acid residue which is covalently linked to another amino acid residue of the sequence
  MISC_FEATURE (30)..(30): Xaa is isoleucine, leucine, valine, phenylalanine, methionine, or an amino acid residue which is covalently linked to another amino acid residue of the sequence
  MISC_FEATURE (31)..(31): Xaa is glycine, alanine, serine, or an amino acid residue which is covalently linked to another amino acid residue of the sequence
  MISC_FEATURE (32)..(32): Xaa is leucine, isoleucine, valine, phenylalanine, methionine, or an amino acid residue which is covalently linked to another amino acid residue of the sequence
  MISC_FEATURE (33)..(33): Xaa is methionine, valine, leucine, isoleucine, alanine, or an amino acid residue which is covalently linked to another amino acid residue of the sequence
  MISC_FEATURE (34)..(34): Xaa is valine, leucine, isoleucine, alanine, methionine, or an amino acid residue which is covalently linked to another amino acid residue of the sequence
  MISC_FEATURE (35)..(35): Xaa is glycine, alanine, serine, or an amino acid residue which is covalently linked to another amino acid residue of the sequence
  MISC_FEATURE (36)..(36): Xaa is glycine, alanine, serine, or an amino acid residue which is covalently linked to another amino acid residue of the sequence
  MISC_FEATURE (37)..(37): Xaa is valine, leucine, isoleucine, alanine, methionine, or an amino acid residue which is covalently linked to another amino acid residue of the sequence
EFRHDSGYEXXXXXXXXXAEDXXXXXXXXXXXXXXXX

SEQ ID NO: 783 - protein, 36 aa, Artificial Sequence
  synthetic
  MISC_FEATURE (9)..(9): Xaa is valine, leucine, isoleucine, alanine, methionine, or an amino acid residue which is covalently linked to another amino acid residue of the sequence
  MISC_FEATURE (10)..(10): Xaa is histidine, tyrosine, serine, methionine, or an amino acid residue which is covalently linked to another amino acid residue of the sequence
  MISC_FEATURE (11)..(11): Xaa is histidine, tyrosine, serine, methionine, or an amino acid residue which is covalently linked to another amino acid residue of the sequence
  MISC_FEATURE (12)..(12): Xaa is glutamine, asparagine, methionine, serine, or an amino acid which is covalently linked to another amino acid residue of the sequence
  MISC_FEATURE (13)..(13): Xaa is lysine, arginine, or an amino acid residue which is covalently linked to another amino acid residue of the sequence
  MISC_FEATURE (14)..(14): Xaa is leucine, isoleucine, valine, phenylalanine, methionine, or an amino acid residue which is covalently linked to another amino acid residue of the sequence
  MISC_FEATURE (15)..(15): Xaa is valine, leucine, isoleucine, alanine, methionine, or an amino acid residue which is covalently linked to another amino acid residue of the sequence
  MISC_FEATURE (16)..(16): Xaa is phenylalanine, tyrosine, valine, leucine, isoleucine, methionine, or an amino acid residue which is covalently linked to another amino acid residue of the sequence
  MISC_FEATURE (17)..(17): Xaa is phenylalanine, tyrosine, valine, leucine, isoleucine, methionine, or an amino acid residue which is covalently linked to another amino acid residue of the sequence
  MISC_FEATURE (21)..(21): Xaa is valine, leucine, isoleucine, alanine, methionine, or an amino acid residue which is covalently linked to another amino acid residue of the sequence
  MISC_FEATURE (22)..(22): Xaa is glycine, alanine, serine, or an amino acid residue which is covalently linked to another amino acid residue of the sequence
  MISC_FEATURE (23)..(23): Xaa is serine, glycine, alanine, threonine, or an amino acid residue which is covalently linked to another amino acid residue of the sequence
  MISC_FEATURE (24)..(24): Xaa is asparagine, glutamine, methionine, or an amino acid residue which is covalently linked to another amino acid residue of the sequence
  MISC_FEATURE (25)..(25): Xaa is lysine, arginine, or an amino acid residue which is covalently linked to another amino acid residue of the sequence
  MISC_FEATURE (26)..(26): Xaa is glycine, alanine, serine, or an amino acid residue which is covalently linked to another amino acid residue of the sequence
  MISC_FEATURE (27)..(27): Xaa is alanine, valine, glycine, serine, or an amino acid residue which is covalently linked to another amino acid residue of the sequence
  MISC_FEATURE (28)..(28): Xaa is isoleucine, leucine, valine, phenylalanine, methionine, or an amino acid residue which is covalently linked to another amino acid residue of the sequence
  MISC_FEATURE (29)..(29): Xaa is isoleucine, leucine, valine, phenylalanine, methionine, or an amino acid residue which is covalently linked to another amino acid residue of the sequence
  MISC_FEATURE (30)..(30): Xaa is glycine, alanine, serine, or an amino acid residue which is covalently linked to another amino acid residue of the sequence
  MISC_FEATURE (31)..(31): Xaa is leucine, isoleucine, valine, phenylalanine, methionine, or an amino acid residue which is covalently linked to another amino acid residue of the sequence
  MISC_FEATURE (32)..(32): Xaa is methionine, valine, leucine, isoleucine, alanine, or an amino acid residue which is covalently linked to another amino acid residue of the sequence
  MISC_FEATURE (33)..(33): Xaa is valine, leucine, isoleucine, alanine, methionine, or an amino acid residue which is covalently linked to another amino acid residue of the sequence
  MISC_FEATURE (34)..(34): Xaa is glycine, alanine, serine, or an amino acid residue which is covalently linked to another amino acid residue of the sequence
  MISC_FEATURE (35)..(35): Xaa is glycine, alanine, serine, or an amino acid residue which is covalently linked to another amino acid residue of the sequence
  MISC_FEATURE (36)..(36): Xaa is valine, leucine, isoleucine, alanine, methionine, or an amino acid residue which is covalently linked to another amino acid residue of the sequence
FRHDSGYEXXXXXXXXXAEDXXXXXXXXXXXXXXXX

SEQ ID NO: 784 - protein, 35 aa, Artificial Sequence
  synthetic
  MISC_FEATURE (8)..(8): Xaa is valine, leucine, isoleucine, alanine, methionine, or an amino acid residue which is covalently linked to another amino acid residue of the sequence
  MISC_FEATURE (9)..(9): Xaa is histidine, tyrosine, serine, methionine, or an amino acid residue which is covalently linked to another amino acid residue of the sequence
  MISC_FEATURE (10)..(10): Xaa is histidine, tyrosine, serine, methionine, or an amino acid residue which is covalently linked to another amino acid residue of the sequence
  MISC_FEATURE (11)..(11): Xaa is glutamine, asparagine, methionine, serine, or an amino acid which is covalently linked to another amino acid residue of the sequence
  MISC_FEATURE (12)..(12): Xaa is lysine, arginine, or an amino acid residue which is covalently linked to another amino acid residue of the sequence
  MISC_FEATURE (13)..(13): Xaa is leucine, isoleucine, valine, phenylalanine, methionine, or an amino acid residue which is covalently linked to another amino acid residue of the sequence
  MISC_FEATURE (14)..(14): Xaa is valine, leucine, isoleucine, alanine, methionine, or an amino acid residue which is covalently linked to another amino acid residue of the sequence
  MISC_FEATURE (15)..(15): Xaa is phenylalanine, tyrosine, valine, leucine, isoleucine, methionine, or an amino acid residue which is covalently linked to another amino acid residue of the sequence
  MISC_FEATURE (16)..(16): Xaa is phenylalanine, tyrosine, valine, leucine, isoleucine, methionine, or an amino acid residue which is covalently linked to another amino acid residue of the sequence
  MISC_FEATURE (20)..(20): Xaa is valine, leucine, isoleucine, alanine, methionine, or an amino acid residue which is covalently linked to another amino acid residue of the sequence
  MISC_FEATURE (21)..(21): Xaa is glycine, alanine, serine, or an amino acid residue which is covalently linked to another amino acid residue of the sequence
  MISC_FEATURE (22)..(22): Xaa is serine, glycine, alanine, threonine, or an amino acid residue which is covalently linked to another amino acid residue of the sequence
  MISC_FEATURE (23)..(23): Xaa is asparagine, glutamine, methionine, or an amino acid residue which is covalently linked to another amino acid residue of the sequence
  MISC_FEATURE (24)..(24): Xaa is lysine, arginine, or an amino acid residue which is covalently linked to another amino acid residue of the sequence
  MISC_FEATURE (25)..(25): Xaa is glycine, alanine, serine, or an amino acid residue which is covalently linked to another amino acid residue of the sequence
  MISC_FEATURE (26)..(26): Xaa is alanine, valine, glycine, serine, or an amino acid residue which is covalently linked to another amino acid residue of the sequence
  MISC_FEATURE (27)..(27): Xaa is isoleucine, leucine, valine, phenylalanine, methionine, or an amino acid residue which is covalently linked to another amino acid residue of the sequence
  MISC_FEATURE (28)..(28): Xaa is isoleucine, leucine, valine, phenylalanine, methionine, or an amino acid residue which is covalently linked to another amino acid residue of the sequence
  MISC_FEATURE (29)..(29): Xaa is glycine, alanine, serine, or an amino acid residue which is covalently linked to another amino acid residue of the sequence
  MISC_FEATURE (30)..(30): Xaa is leucine, isoleucine, valine, phenylalanine, methionine, or an amino acid residue which is covalently linked to another amino acid residue of the sequence
  MISC_FEATURE (31)..(31): Xaa is methionine, valine, leucine, isoleucine, alanine, or an amino acid residue which is covalently linked to another amino acid residue of the sequence
  MISC_FEATURE (32)..(32): Xaa is valine, leucine, isoleucine, alanine, methionine, or an amino acid residue which is covalently linked to another amino acid residue of the sequence
  MISC_FEATURE (33)..(33): Xaa is glycine, alanine, serine, or an amino acid residue which is covalently linked to another amino acid residue of the sequence
  MISC_FEATURE (34)..(34): Xaa is glycine, alanine, serine, or an amino acid residue which is covalently linked to another amino acid residue of the sequence
  MISC_FEATURE (35)..(35): Xaa is valine, leucine, isoleucine, alanine, methionine, or an amino acid residue which is covalently linked to another amino acid residue of the sequence
RHDSGYEXXXXXXXXXAEDXXXXXXXXXXXXXXXX

SEQ ID NO: 785 - protein, 34 aa, Artificial Sequence
  synthetic
  MISC_FEATURE (7)..(7): Xaa is valine, leucine, isoleucine, alanine, methionine, or an amino acid residue which is covalently linked to another amino acid residue of the sequence
  MISC_FEATURE (8)..(8): Xaa is histidine, tyrosine, serine, methionine, or an amino acid residue which is covalently linked to another amino acid residue of the sequence
  MISC_FEATURE (9)..(9): Xaa is histidine, tyrosine, serine, methionine, or an amino acid residue which is covalently linked to another amino acid residue of the sequence
  MISC_FEATURE (10)..(10): Xaa is glutamine, asparagine, methionine, serine, or an amino acid which is covalently linked to another amino acid residue of the sequence
  MISC_FEATURE (11)..(11): Xaa is lysine, arginine, or an amino acid residue which is covalently linked to another amino acid residue of the sequence
  MISC_FEATURE (12)..(12): Xaa is leucine, isoleucine, valine, phenylalanine, methionine, or an amino acid residue which is covalently linked to another amino acid residue of the sequence
  MISC_FEATURE (13)..(13): Xaa is valine, leucine, isoleucine, alanine, methionine, or an amino acid residue which is covalently linked to another amino acid residue of the sequence
  MISC_FEATURE (14)..(14): Xaa is phenylalanine, tyrosine, valine, leucine, isoleucine, methionine, or an amino acid residue which is covalently linked to another amino acid residue of the sequence
  MISC_FEATURE (15)..(15): Xaa is phenylalanine, tyrosine, valine, leucine, isoleucine, methionine, or an amino acid residue which is covalently linked to another amino acid residue of the sequence
  MISC_FEATURE (19)..(19): Xaa is valine, leucine, isoleucine, alanine, methionine, or an amino acid residue which is covalently linked to another amino acid residue of the sequence
  MISC_FEATURE (20)..(20): Xaa is glycine, alanine, serine, or an amino acid residue which is covalently linked to another amino acid residue of the sequence
  MISC_FEATURE (21)..(21): Xaa is serine, glycine, alanine, threonine, or an amino acid residue which is covalently linked to another amino acid residue of the sequence
  MISC_FEATURE (22)..(22): Xaa is asparagine, glutamine, methionine, or an amino acid residue which is covalently linked to another amino acid residue of the sequence
  MISC_FEATURE (23)..(23): Xaa is lysine, arginine, or an amino acid residue which is covalently linked to another amino acid residue of the sequence
  MISC_FEATURE (24)..(24): Xaa is glycine, alanine, serine, or an amino acid residue which is covalently linked to another amino acid residue of the sequence
  MISC_FEATURE (25)..(25): Xaa is alanine, valine, glycine, serine, or an amino acid residue which is covalently linked to another amino acid residue of the sequence
  MISC_FEATURE (26)..(26): Xaa is isoleucine, leucine, valine, phenylalanine, methionine, or an amino acid residue which is covalently linked to another amino acid residue of the sequence
  MISC_FEATURE (27)..(27): Xaa is isoleucine, leucine, valine, phenylalanine, methionine, or an amino acid residue which is covalently linked to another amino acid residue of the sequence
  MISC_FEATURE (28)..(28): Xaa is glycine, alanine, serine, or an amino acid residue which is covalently linked to another amino acid residue of the sequence
  MISC_FEATURE (29)..(29): Xaa is leucine, isoleucine, valine, phenylalanine, methionine, or an amino acid residue which is covalently linked to another amino acid residue of the sequence
  MISC_FEATURE (30)..(30): Xaa is methionine, valine, leucine, isoleucine, alanine, or an amino acid residue which is covalently linked to another amino acid residue of the sequence
  MISC_FEATURE (31)..(31): Xaa is valine, leucine, isoleucine, alanine, methionine, or an amino acid residue which is covalently linked to another amino acid residue of the sequence
  MISC_FEATURE (32)..(32): Xaa is glycine, alanine, serine, or an amino acid residue which is covalently linked to another amino acid residue of the sequence
  MISC_FEATURE (33)..(33): Xaa is glycine, alanine, serine, or an amino acid residue which is covalently linked to another amino acid residue of the sequence
  MISC_FEATURE (34)..(34): Xaa is valine, leucine, isoleucine, alanine, methionine, or an amino acid residue which is covalently linked to another amino acid residue of the sequence
HDSGYEXXXXXXXXXAEDXXXXXXXXXXXXXXXX

SEQ ID NO: 786 - protein, 33 aa, Artificial Sequence
  synthetic
  MISC_FEATURE (6)..(6): Xaa is valine, leucine, isoleucine, alanine, methionine, or an amino acid residue which is covalently linked to another amino acid residue of the sequence
  MISC_FEATURE (7)..(7): Xaa is histidine, tyrosine, serine, methionine, or an amino acid residue which is covalently linked to another amino acid residue of the sequence
  MISC_FEATURE (8)..(8): Xaa is histidine, tyrosine, serine, methionine, or an amino acid residue which is covalently linked to another amino acid residue of the sequence
  MISC_FEATURE (9)..(9): Xaa is glutamine, asparagine, methionine, serine, or an amino acid which is covalently linked to another amino acid residue of the sequence
  MISC_FEATURE (10)..(10): Xaa is lysine, arginine, or an amino acid residue which is covalently linked to another amino acid residue of the sequence
  MISC_FEATURE (11)..(11): Xaa is leucine, isoleucine, valine, phenylalanine, methionine, or an amino acid residue which is covalently linked to another amino acid residue of the sequence
  MISC_FEATURE (12)..(12): Xaa is valine, leucine, isoleucine, alanine, methionine, or an amino acid residue which is covalently linked to another amino acid residue of the sequence
  MISC_FEATURE (13)..(13): Xaa is phenylalanine, tyrosine, valine, leucine, isoleucine, methionine, or an amino acid residue which is covalently linked to another amino acid residue of the sequence
  MISC_FEATURE (14)..(14): Xaa is phenylalanine, tyrosine, valine, leucine, isoleucine, methionine, or an amino acid residue which is covalently linked to another amino acid residue of the sequence
  MISC_FEATURE (18)..(18): Xaa is valine, leucine, isoleucine, alanine, methionine, or an amino acid residue which is covalently linked to another amino acid residue of the sequence
  MISC_FEATURE (19)..(19): Xaa is glycine, alanine, serine, or an amino acid residue which is covalently linked to another amino acid residue of the sequence
  MISC_FEATURE (20)..(20): Xaa is serine, glycine, alanine, threonine, or an amino acid residue which is covalently linked to another amino acid residue of the sequence
  MISC_FEATURE (21)..(21): Xaa is asparagine, glutamine, methionine, or an amino acid residue which is covalently linked to another amino acid residue of the sequence
  MISC_FEATURE (22)..(22): Xaa is lysine, arginine, or an amino acid residue which is covalently linked to another amino acid residue of the sequence
  MISC_FEATURE (23)..(23): Xaa is glycine, alanine, serine, or an amino acid residue which is covalently linked to another amino acid residue of the sequence
  MISC_FEATURE (24)..(24): Xaa is alanine, valine, glycine, serine, or an amino acid residue which is covalently linked to another amino acid residue of the sequence
  MISC_FEATURE (25)..(25): Xaa is isoleucine, leucine, valine, phenylalanine, methionine, or an amino acid residue which is covalently linked to another amino acid residue of the sequence
  MISC_FEATURE (26)..(26): Xaa is isoleucine, leucine, valine, phenylalanine, methionine, or an amino acid residue which is covalently linked to another amino acid residue of the sequence
  MISC_FEATURE (27)..(27): Xaa is glycine, alanine, serine, or an amino acid residue which is covalently linked to another amino acid residue of the sequence
  MISC_FEATURE (28)..(28): Xaa is leucine, isoleucine, valine, phenylalanine, methionine, or an amino acid residue which is covalently linked to another amino acid residue of the sequence
  MISC_FEATURE (29)..(29): Xaa is methionine, valine, leucine, isoleucine, alanine, or an amino acid residue which is covalently linked to another amino acid residue of the sequence
  MISC_FEATURE (30)..(30): Xaa is valine, leucine, isoleucine, alanine, methionine, or an amino acid residue which is covalently linked to another amino acid residue of the sequence
  MISC_FEATURE (31)..(31): Xaa is glycine, alanine, serine, or an amino acid residue which is covalently linked to another amino acid residue of the sequence
  MISC_FEATURE (32)..(32): Xaa is glycine, alanine, serine, or an amino acid residue which is covalently linked to another amino acid residue of the sequence
  MISC_FEATURE (33)..(33): Xaa is valine, leucine, isoleucine, alanine, methionine, or an amino acid residue which is covalently linked to another amino acid residue of the sequence
DSGYEXXXXXXXXXAEDXXXXXXXXXXXXXXXX

SEQ ID NO: 787 - protein, 32 aa, Artificial Sequence
  synthetic
  MISC_FEATURE (5)..(5): Xaa is valine, leucine, isoleucine, alanine, methionine, or an amino acid residue which is covalently linked to another amino acid residue of the sequence
  MISC_FEATURE (6)..(6): Xaa is histidine, tyrosine, serine, methionine, or an amino acid residue which is covalently linked to another amino acid residue of the sequence
  MISC_FEATURE (7)..(7): Xaa is histidine, tyrosine, serine, methionine, or an amino acid residue which is covalently linked to another amino acid residue of the sequence
  MISC_FEATURE (8)..(8): Xaa is glutamine, asparagine, methionine, serine, or an amino acid which is covalently linked to another amino acid residue of the sequence
  MISC_FEATURE (9)..(9): Xaa is lysine, arginine, or an amino acid residue which is covalently linked to another amino acid residue of the sequence
  MISC_FEATURE (10)..(10): Xaa is leucine, isoleucine, valine, phenylalanine, methionine, or an amino acid residue which is covalently linked to another amino acid residue of the sequence
  MISC_FEATURE (11)..(11): Xaa is valine, leucine, isoleucine, alanine, methionine, or an amino acid residue which is covalently linked to another amino acid residue of the sequence
  MISC_FEATURE (12)..(12): Xaa is phenylalanine, tyrosine, valine, leucine, isoleucine, methionine, or an amino acid residue which is covalently linked to another amino acid residue of the sequence
  MISC_FEATURE (13)..(13): Xaa is phenylalanine, tyrosine, valine, leucine, isoleucine, methionine, or an amino acid residue which is covalently linked to another amino acid residue of the sequence
  MISC_FEATURE (17)..(17): Xaa is valine, leucine, isoleucine, alanine, methionine, or an amino acid residue which is covalently linked to another amino acid residue of the sequence
  MISC_FEATURE (18)..(18): Xaa is glycine, alanine, serine, or an amino acid residue which is covalently linked to another amino acid residue of the sequence
  MISC_FEATURE (19)..(19): Xaa is serine, glycine, alanine, threonine, or an amino acid residue which is covalently linked to another amino acid residue of the sequence
  MISC_FEATURE (20)..(20): Xaa is asparagine, glutamine, methionine, or an amino acid residue which is covalently linked to another amino acid residue of the sequence
  MISC_FEATURE (21)..(21): Xaa is lysine, arginine, or an amino acid residue which is covalently linked to another amino acid residue of the sequence
  MISC_FEATURE (22)..(22): Xaa is glycine, alanine, serine, or an amino acid residue which is covalently linked to another amino acid residue of the sequence
  MISC_FEATURE (23)..(23): Xaa is alanine, valine, glycine, serine, or an amino acid residue which is covalently linked to another amino acid residue of the sequence
  MISC_FEATURE (24)..(24): Xaa is isoleucine, leucine, valine, phenylalanine, methionine, or an amino acid residue which is covalently linked to another amino acid residue of the sequence
  MISC_FEATURE (25)..(25): Xaa is isoleucine, leucine, valine, phenylalanine, methionine, or an amino acid residue which is covalently linked to another amino acid residue of the sequence
  MISC_FEATURE (26)..(26): Xaa is glycine, alanine, serine, or an amino acid residue which is covalently linked to another amino acid residue of the sequence
  MISC_FEATURE (27)..(27): Xaa is leucine, isoleucine, valine, phenylalanine, methionine, or an amino acid residue which is covalently linked to another amino acid residue of the sequence
  MISC_FEATURE (28)..(28): Xaa is methionine, valine, leucine, isoleucine, alanine, or an amino acid residue which is covalently linked to another amino acid residue of the sequence
  MISC_FEATURE (29)..(29): Xaa is valine, leucine, isoleucine, alanine, methionine, or an amino acid residue which is covalently linked to another amino acid residue of the sequence
  MISC_FEATURE (30)..(30): Xaa is glycine, alanine, serine, or an amino acid residue which is covalently linked to another amino acid residue of the sequence
  MISC_FEATURE (31)..(31): Xaa is glycine, alanine, serine, or an amino acid residue which is covalently linked to another amino acid residue of the sequence
  MISC_FEATURE (32)..(32): Xaa is valine, leucine, isoleucine, alanine, methionine, or an amino acid residue which is covalently linked to another amino acid residue of the sequence
SGYEXXXXXXXXXAEDXXXXXXXXXXXXXXXX

SEQ ID NO: 788 - protein, 31 aa, Artificial Sequence
  synthetic
  MISC_FEATURE (4)..(4): Xaa is valine, leucine, isoleucine, alanine, methionine, or an amino acid residue which is covalently linked to another amino acid residue of the sequence
  MISC_FEATURE (5)..(5): Xaa is histidine, tyrosine, serine, methionine, or an amino acid residue which is covalently linked to another amino acid residue of the sequence
  MISC_FEATURE (6)..(6): Xaa is histidine, tyrosine, serine, methionine, or an amino acid residue which is covalently linked to another amino acid residue of the sequence
  MISC_FEATURE (7)..(7): Xaa is glutamine, asparagine, methionine, serine, or an amino acid which is covalently linked to another amino acid residue of the sequence
  MISC_FEATURE (8)..(8): Xaa is lysine, arginine, or an amino acid residue which is covalently linked to another amino acid residue of the sequence
  MISC_FEATURE (9)..(9): Xaa is leucine, isoleucine, valine, phenylalanine, methionine, or an amino acid residue which is covalently linked to another amino acid residue of the sequence
  MISC_FEATURE (10)..(10): Xaa is valine, leucine, isoleucine, alanine, methionine, or an amino acid residue which is covalently linked to another amino acid residue of the sequence
  MISC_FEATURE (11)..(11): Xaa is phenylalanine, tyrosine, valine, leucine, isoleucine, methionine, or an amino acid residue which is covalently linked to another amino acid residue of the sequence
  MISC_FEATURE (12)..(12): Xaa is phenylalanine, tyrosine, valine, leucine, isoleucine, methionine, or an amino acid residue which is covalently linked to another amino acid residue of the sequence
  MISC_FEATURE (16)..(16): Xaa is valine, leucine, isoleucine, alanine, methionine, or an amino acid residue which is covalently linked to another amino acid residue of the sequence
  MISC_FEATURE (17)..(17): Xaa is glycine, alanine, serine, or an amino acid residue which is covalently linked to another amino acid residue of the sequence
  MISC_FEATURE (18)..(18): Xaa is serine, glycine, alanine, threonine, or an amino acid residue which is covalently linked to another amino acid residue of the sequence
  MISC_FEATURE (19)..(19): Xaa is asparagine, glutamine, methionine, or an amino acid residue which is covalently linked to another amino acid residue of the sequence
  MISC_FEATURE (20)..(20): Xaa is lysine, arginine, or an amino acid residue which is covalently linked to another amino acid residue of the sequence
  MISC_FEATURE (21)..(21): Xaa is glycine, alanine, serine, or an amino acid residue which is covalently linked to another amino acid residue of the sequence
  MISC_FEATURE (22)..(22): Xaa is alanine, valine, glycine, serine, or an amino acid residue which is covalently linked to another amino acid residue of the sequence
  MISC_FEATURE (23)..(23): Xaa is isoleucine, leucine, valine, phenylalanine, methionine, or an amino acid residue which is covalently linked to another amino acid residue of the sequence
  MISC_FEATURE (24)..(24): Xaa is isoleucine, leucine, valine, phenylalanine, methionine, or an amino acid residue which is covalently linked to another amino acid residue of the sequence
  MISC_FEATURE (25)..(25): Xaa is glycine, alanine, serine, or an amino acid residue which is covalently linked to another amino acid residue of the sequence
  MISC_FEATURE (26)..(26): Xaa is leucine, isoleucine, valine, phenylalanine, methionine, or an amino acid residue which is covalently linked to another amino acid residue of the sequence
  MISC_FEATURE (27)..(27): Xaa is methionine, valine, leucine, isoleucine, alanine, or an amino acid residue which is covalently linked to another amino acid residue of the sequence
  MISC_FEATURE (28)..(28): Xaa is valine, leucine, isoleucine, alanine, methionine, or an amino acid residue which is covalently linked to another amino acid residue of the sequence
  MISC_FEATURE (29)..(29): Xaa is glycine, alanine, serine, or an amino acid residue which is covalently linked to another amino acid residue of the sequence
  MISC_FEATURE (30)..(30): Xaa is glycine, alanine, serine, or an amino acid residue which is covalently linked to another amino acid residue of the sequence
  MISC_FEATURE (31)..(31): Xaa is valine, leucine, isoleucine, alanine, methionine, or an amino acid residue which is covalently linked to another amino acid residue of the sequence
GYEXXXXXXXXXAEDXXXXXXXXXXXXXXXX

SEQ ID NO: 789 - protein, 30 aa, Artificial Sequence
  synthetic
  MISC_FEATURE (3)..(3): Xaa is valine, leucine, isoleucine, alanine, methionine, or an amino acid residue which is covalently linked to another amino acid residue of the sequence
  MISC_FEATURE (4)..(4): Xaa is histidine, tyrosine, serine, methionine, or an amino acid residue which is covalently linked to another amino acid residue of the sequence
  MISC_FEATURE (5)..(5): Xaa is histidine, tyrosine, serine, methionine, or an amino acid residue which is covalently linked to another amino acid residue of the sequence
  MISC_FEATURE (6)..(6): Xaa is glutamine, asparagine, methionine, serine, or an amino acid which is covalently linked to another amino acid residue of the sequence
  MISC_FEATURE (7)..(7): Xaa is lysine, arginine, or an amino acid residue which is covalently linked to another amino acid residue of the sequence
  MISC_FEATURE (8)..(8): Xaa is leucine, isoleucine, valine, phenylalanine, methionine, or an amino acid residue which is covalently linked to another amino acid residue of the sequence
  MISC_FEATURE (9)..(9): Xaa is valine, leucine, isoleucine, alanine, methionine, or an amino acid residue which is covalently linked to another amino acid residue of the sequence
  MISC_FEATURE (10)..(10): Xaa is phenylalanine, tyrosine, valine, leucine, isoleucine, methionine, or an amino acid residue which is covalently linked to another amino acid residue of the sequence
  MISC_FEATURE (11)..(11): Xaa is phenylalanine, tyrosine, valine, leucine, isoleucine, methionine, or an amino acid residue which is covalently linked to another amino acid residue of the sequence
  MISC_FEATURE (15)..(15): Xaa is valine, leucine, isoleucine, alanine, methionine, or an amino acid residue which is covalently linked to another amino acid residue of the sequence
  MISC_FEATURE (16)..(16): Xaa is glycine, alanine, serine, or an amino acid residue which is covalently linked to another amino acid residue of the sequence
  MISC_FEATURE (17)..(17): Xaa is serine, glycine, alanine, threonine, or an amino acid residue which is covalently linked to another amino acid residue of the sequence
  MISC_FEATURE (18)..(18): Xaa is asparagine, glutamine, methionine, or an amino acid residue which is covalently linked to another amino acid residue of the sequence
  MISC_FEATURE (19)..(19): Xaa is lysine, arginine, or an amino acid residue which is covalently linked to another amino acid residue of the sequence
  MISC_FEATURE (20)..(20): Xaa is glycine, alanine, serine, or an amino acid residue which is covalently linked to another amino acid residue of the sequence
  MISC_FEATURE (21)..(21): Xaa is alanine, valine, glycine, serine, or an amino acid residue which is covalently linked to another amino acid residue of the sequence
  MISC_FEATURE (22)..(22): Xaa is isoleucine, leucine, valine, phenylalanine, methionine, or an amino acid residue which is covalently linked to another amino acid residue of the sequence
  MISC_FEATURE (23)..(23): Xaa is isoleucine, leucine, valine, phenylalanine, methionine, or an amino acid residue which is covalently linked to another amino acid residue of the sequence
  MISC_FEATURE (24)..(24): Xaa is glycine, alanine, serine, or an amino acid residue which is covalently linked to another amino acid residue of the sequence
  MISC_FEATURE (25)..(25): Xaa is leucine, isoleucine, valine, phenylalanine, methionine, or an amino acid residue which is covalently linked to another amino acid residue of the sequence
  MISC_FEATURE (26)..(26): Xaa is methionine, valine, leucine, isoleucine, alanine, or an amino acid residue which is covalently linked to another amino acid residue of the sequence
  MISC_FEATURE (27)..(27): Xaa is valine, leucine, isoleucine, alanine, methionine, or an amino acid residue which is covalently linked to another amino acid residue of the sequence
  MISC_FEATURE (28)..(28): Xaa is glycine, alanine, serine, or an amino acid residue which is covalently linked to another amino acid residue of the sequence
  MISC_FEATURE (29)..(29): Xaa is glycine, alanine, serine, or an amino acid residue which is covalently linked to another amino acid residue of the sequence
  MISC_FEATURE (30)..(30): Xaa is valine, leucine, isoleucine, alanine, methionine, or an amino acid residue which is covalently linked to another amino acid residue of the sequence
YEXXXXXXXXXAEDXXXXXXXXXXXXXXXX

SEQ ID NO: 790 - protein, 29 aa, Artificial Sequence
  synthetic
  MISC_FEATURE (2)..(2): Xaa is valine, leucine, isoleucine, alanine, methionine, or an amino acid residue which is covalently linked to another amino acid residue of the sequence
  MISC_FEATURE (3)..(3): Xaa is histidine, tyrosine, serine, methionine, or an amino acid residue which is covalently linked to another amino acid residue of the sequence
  MISC_FEATURE (4)..(4): Xaa is histidine, tyrosine, serine, methionine, or an amino acid residue which is covalently linked to another amino acid residue of the sequence
  MISC_FEATURE (5)..(5): Xaa is glutamine, asparagine, methionine, serine, or an amino acid which is covalently linked to another amino acid residue of the sequence
  MISC_FEATURE (6)..(6): Xaa is lysine, arginine, or an amino acid residue which is covalently linked to another amino acid residue of the sequence
  MISC_FEATURE (7)..(7): Xaa is leucine, isoleucine, valine, phenylalanine, methionine, or an amino acid residue which is covalently linked to another amino acid residue of the sequence
  MISC_FEATURE (8)..(8): Xaa is valine, leucine, isoleucine, alanine, methionine, or an amino acid residue which is covalently linked to another amino acid residue of the sequence
  MISC_FEATURE (9)..(9): Xaa is phenylalanine, tyrosine, valine, leucine, isoleucine, methionine, or an amino acid residue which is covalently linked to another amino acid residue of the sequence
  MISC_FEATURE (10)..(10): Xaa is phenylalanine, tyrosine, valine, leucine, isoleucine, methionine, or an amino acid residue which is covalently linked to another amino acid residue of the sequence
  MISC_FEATURE (14)..(14): Xaa is valine, leucine, isoleucine, alanine, methionine, or an amino acid residue which is covalently linked to another amino acid residue of the sequence
  MISC_FEATURE (15)..(15): Xaa is glycine, alanine, serine, or an amino acid residue which is covalently linked to another amino acid residue of the sequence
  MISC_FEATURE (16)..(16): Xaa is serine, glycine, alanine, threonine, or an amino acid residue which is covalently linked to another amino acid residue of the sequence
  MISC_FEATURE (17)..(17): Xaa is asparagine, glutamine, methionine, or an amino acid residue which is covalently linked to another amino acid residue of the sequence
  MISC_FEATURE (18)..(18): Xaa is lysine, arginine, or an amino acid residue which is covalently linked to another amino acid residue of the sequence
  MISC_FEATURE (19)..(19): Xaa is glycine, alanine, serine, or an amino acid residue which is covalently linked to another amino acid residue of the sequence
  MISC_FEATURE (20)..(20): Xaa is alanine, valine, glycine, serine, or an amino acid residue which is covalently linked to another amino acid residue of the sequence
  MISC_FEATURE (21)..(21): Xaa is isoleucine, leucine, valine, phenylalanine, methionine, or an amino acid residue which is covalently linked to another amino acid residue of the sequence
  MISC_FEATURE (22)..(22): Xaa is isoleucine, leucine, valine, phenylalanine, methionine, or an amino acid residue which is covalently linked to another amino acid residue of the sequence
  MISC_FEATURE (23)..(23): Xaa is glycine, alanine, serine, or an amino acid residue which is covalently linked to another amino acid residue of the sequence
  MISC_FEATURE (24)..(24): Xaa is leucine, isoleucine, valine, phenylalanine, methionine, or an amino acid residue which is covalently linked to another amino acid residue of the sequence
  MISC_FEATURE (25)..(25): Xaa is methionine, valine, leucine, isoleucine, alanine, or an amino acid residue which is covalently linked to another amino acid residue of the sequence
  MISC_FEATURE (26)..(26): Xaa is valine, leucine, isoleucine, alanine, methionine, or an amino acid residue which is covalently linked to another amino acid residue of the sequence
  MISC_FEATURE (27)..(27): Xaa is glycine, alanine, serine, or an amino acid residue which is covalently linked to another amino acid residue of the sequence
  MISC_FEATURE (28)..(28): Xaa is glycine, alanine, serine, or an amino acid residue which is covalently linked to another amino acid residue of the sequence
  MISC_FEATURE (29)..(29): Xaa is valine, leucine, isoleucine, alanine, methionine, or an amino acid residue which is covalently linked to another amino acid residue of the sequence
EXXXXXXXXXAEDXXXXXXXXXXXXXXXX

SEQ ID NO: 791 - protein, 28 aa, Artificial Sequence
  synthetic
  MISC_FEATURE (1)..(1): Xaa is valine, leucine, isoleucine, alanine, methionine, or an amino acid residue which is covalently linked to another amino acid residue of the sequence
  MISC_FEATURE (2)..(2): Xaa is histidine, tyrosine, serine, methionine, or an amino acid residue which is covalently linked to another amino acid residue of the sequence
  MISC_FEATURE (3)..(3): Xaa is histidine, tyrosine, serine, methionine, or an amino acid residue which is covalently linked to another amino acid residue of the sequence
  MISC_FEATURE (4)..(4): Xaa is glutamine, asparagine, methionine, serine, or an amino acid which is covalently linked to another amino acid residue of the sequence
  MISC_FEATURE (5)..(5): Xaa is lysine, arginine, or an amino acid residue which is covalently linked to another amino acid residue of the sequence
  MISC_FEATURE (6)..(6): Xaa is leucine, isoleucine, valine, phenylalanine, methionine, or an amino acid residue which is covalently linked to another amino acid residue of the sequence
  MISC_FEATURE (7)..(7): Xaa is valine, leucine, isoleucine, alanine, methionine, or an amino acid residue which is covalently linked to another amino acid residue of the sequence
  MISC_FEATURE (8)..(8): Xaa is phenylalanine, tyrosine, valine, leucine, isoleucine, methionine, or an amino acid residue which is covalently linked to another amino acid residue of the sequence
  MISC_FEATURE (9)..(9): Xaa is phenylalanine, tyrosine, valine, leucine, isoleucine, methionine, or an amino acid residue which is covalently linked to another amino acid residue of the sequence
  MISC_FEATURE (13)..(13): Xaa is valine, leucine, isoleucine, alanine, methionine, or an amino acid residue which is covalently linked to another amino acid residue of the sequence
  MISC_FEATURE (14)..(14): Xaa is glycine, alanine, serine, or an amino acid residue which is covalently linked to another amino acid residue of the sequence
  MISC_FEATURE (15)..(15): Xaa is serine, glycine, alanine, threonine, or an amino acid residue which is covalently linked to another amino acid residue of the sequence
  MISC_FEATURE (16)..(16): Xaa is asparagine, glutamine, methionine, or an amino acid residue which is covalently linked to another amino acid residue of the sequence
  MISC_FEATURE (17)..(17): Xaa is lysine, arginine, or an amino acid residue which is covalently linked to another amino acid residue of the sequence
  MISC_FEATURE (18)..(18): Xaa is glycine, alanine, serine, or an amino acid residue which is covalently linked to another amino acid residue of the sequence
  MISC_FEATURE (19)..(19): Xaa is alanine, valine, glycine, serine, or an amino acid residue which is covalently linked to another amino acid residue of the sequence
  MISC_FEATURE (20)..(20): Xaa is isoleucine, leucine, valine, phenylalanine, methionine, or an amino acid residue which is covalently linked to another amino acid residue of the sequence
  MISC_FEATURE (21)..(21): Xaa is isoleucine, leucine, valine, phenylalanine, methionine, or an amino acid residue which is covalently linked to another amino acid residue of the sequence
  MISC_FEATURE (22)..(22): Xaa is glycine, alanine, serine, or an amino acid residue which is covalently linked to another amino acid residue of the sequence
  MISC_FEATURE (23)..(23): Xaa is leucine, isoleucine, valine, phenylalanine, methionine, or an amino acid residue which is covalently linked to another amino acid residue of the sequence
  MISC_FEATURE (24)..(24): Xaa is methionine, valine, leucine, isoleucine, alanine, or an amino acid residue which is covalently linked to another amino acid residue of the sequence
  MISC_FEATURE (25)..(25): Xaa is valine, leucine, isoleucine, alanine, methionine, or an amino acid residue which is covalently linked to another amino acid residue of the sequence
  MISC_FEATURE (26)..(26): Xaa is glycine, alanine, serine, or an amino acid residue which is covalently linked to another amino acid residue of the sequence
  MISC_FEATURE (27)..(27): Xaa is glycine, alanine, serine, or an amino acid residue which is covalently linked to another amino acid residue of the sequence
  MISC_FEATURE (28)..(28): Xaa is valine, leucine, isoleucine, alanine, methionine, or an amino acid residue which is covalently linked to another amino acid residue of the sequence
XXXXXXXXXAEDXXXXXXXXXXXXXXXX

SEQ ID NO: 792 - protein, 27 aa, Artificial Sequence
  synthetic
  MISC_FEATURE (1)..(1): Xaa is histidine, tyrosine, serine, methionine, or an amino acid residue which is covalently linked to another amino acid residue of the sequence
  MISC_FEATURE (2)..(2): Xaa is histidine, tyrosine, serine, methionine, or an amino acid residue which is covalently linked to another amino acid residue of the sequence
  MISC_FEATURE (3)..(3): Xaa is glutamine, asparagine, methionine, serine, or an amino acid which is covalently linked to another amino acid residue of the sequence
  MISC_FEATURE (4)..(4): Xaa is lysine, arginine, or an amino acid residue which is covalently linked to another amino acid residue of the sequence
  MISC_FEATURE (5)..(5): Xaa is leucine, isoleucine, valine, phenylalanine, methionine, or an amino acid residue which is covalently linked to another amino acid residue of the sequence
  MISC_FEATURE (6)..(6): Xaa is valine, leucine, isoleucine, alanine, methionine, or an amino acid residue which is covalently linked to another amino acid residue of the sequence
  MISC_FEATURE (7)..(7): Xaa is phenylalanine, tyrosine, valine, leucine, isoleucine, methionine, or an amino acid residue which is covalently linked to another amino acid residue of the sequence
  MISC_FEATURE (8)..(8): Xaa is phenylalanine, tyrosine, valine, leucine, isoleucine, methionine, or an amino acid residue which is covalently linked to another amino acid residue of the sequence
  MISC_FEATURE (12)..(12): Xaa is valine, leucine, isoleucine, alanine, methionine, or an amino acid residue which is covalently linked to another amino acid residue of the sequence
  MISC_FEATURE (13)..(13): Xaa is glycine, alanine, serine, or an amino acid residue which is covalently linked to another amino acid residue of the sequence
  MISC_FEATURE (14)..(14): Xaa is serine, glycine, alanine, threonine, or an amino acid residue which is covalently linked to another amino acid residue of the sequence
  MISC_FEATURE (15)..(15): Xaa is asparagine, glutamine, methionine, or an amino acid residue which is covalently linked to another amino acid residue of the sequence
  MISC_FEATURE (16)..(16): Xaa is lysine, arginine, or an amino acid residue which is covalently linked to another amino acid residue of the sequence
  MISC_FEATURE (17)..(17): Xaa is glycine, alanine, serine, or an amino acid residue which is covalently linked to another amino acid residue of the sequence
  MISC_FEATURE (18)..(18): Xaa is alanine, valine, glycine, serine, or an amino acid residue which is covalently linked to another amino acid residue of the sequence
  MISC_FEATURE (19)..(19): Xaa is isoleucine, leucine, valine, phenylalanine, methionine, or an amino acid residue which is covalently linked to another amino acid residue of the sequence
  MISC_FEATURE (20)..(20): Xaa is isoleucine, leucine, valine, phenylalanine, methionine, or an amino acid residue which is covalently linked to another amino acid residue of the sequence
  MISC_FEATURE (21)..(21): Xaa is glycine, alanine, serine, or an amino acid residue which is covalently linked to another amino acid residue of the sequence
  MISC_FEATURE (22)..(22): Xaa is leucine, isoleucine, valine, phenylalanine, methionine, or an amino acid residue which is covalently linked to another amino acid residue of the sequence
  MISC_FEATURE (23)..(23): Xaa is methionine, valine, leucine, isoleucine, alanine, or an amino acid residue which is covalently linked to another amino acid residue of the sequence
  MISC_FEATURE (24)..(24): Xaa is valine, leucine, isoleucine, alanine, methionine, or an amino acid residue which is covalently linked to another amino acid residue of the sequence
  MISC_FEATURE (25)..(25): Xaa is glycine, alanine, serine, or an amino acid residue which is covalently linked to another amino acid residue of the sequence
  MISC_FEATURE (26)..(26): Xaa is glycine, alanine, serine, or an amino acid residue which is covalently linked to another amino acid residue of the sequence
XXXXXXXXAEDXXXXXXXXXXXXXXXV

SEQ ID NO: 793 - protein, 26 aa, Artificial Sequence
  synthetic
  MISC_FEATURE (1)..(1): Xaa is histidine, tyrosine, serine, methionine, or an amino acid residue which is covalently linked to another amino acid residue of the sequence
  MISC_FEATURE (2)..(2): Xaa is glutamine, asparagine, methionine, serine, or an amino acid which is covalently linked to another amino acid residue of the sequence
  MISC_FEATURE (3)..(3): Xaa is lysine, arginine, or an amino acid residue which is covalently linked to another amino acid residue of the sequence
  MISC_FEATURE (4)..(4): Xaa is leucine, isoleucine, valine, phenylalanine, methionine, or an amino acid residue which is covalently linked to another amino acid residue of the sequence
  MISC_FEATURE (5)..(5): Xaa is valine, leucine, isoleucine, alanine, methionine, or an amino acid residue which is covalently linked to another amino acid residue of the sequence
  MISC_FEATURE (6)..(6): Xaa is phenylalanine, tyrosine, valine, leucine, isoleucine, methionine, or an amino acid residue which is covalently linked to another amino acid residue of the sequence
  MISC_FEATURE (7)..(7): Xaa is phenylalanine, tyrosine, valine, leucine, isoleucine, methionine, or an amino acid residue which is covalently linked to another amino acid residue of the sequence
  MISC_FEATURE (11)..(11): Xaa is valine, leucine, isoleucine, alanine, methionine, or an amino acid residue which is covalently linked to another amino acid residue of the sequence
  MISC_FEATURE (12)..(12): Xaa is glycine, alanine, serine, or an amino acid residue which is covalently linked to another amino acid residue of the sequence
  MISC_FEATURE (13)..(13): Xaa is serine, glycine, alanine, threonine, or an amino acid residue which is covalently linked to another amino acid residue of the sequence
  MISC_FEATURE (14)..(14): Xaa is asparagine, glutamine, methionine, or an amino acid residue which is covalently linked to another amino acid residue of the sequence
  MISC_FEATURE (15)..(15): Xaa is lysine, arginine, or an amino acid residue which is covalently linked to another amino acid residue of the sequence
  MISC_FEATURE (16)..(16): Xaa is glycine, alanine, serine, or an amino acid residue which is covalently linked to another amino acid residue of the sequence
  MISC_FEATURE (17)..(17): Xaa is alanine, valine, glycine, serine, or an amino acid residue which is covalently linked to another amino acid residue of the sequence
  MISC_FEATURE (18)..(18): Xaa is isoleucine, leucine, valine, phenylalanine, methionine, or an amino acid residue which is covalently linked to another amino acid residue of the sequence
  MISC_FEATURE (19)..(19): Xaa is isoleucine, leucine, valine, phenylalanine, methionine, or an amino acid residue which is covalently linked to another amino acid residue of the sequence
  MISC_FEATURE (20)..(20): Xaa is glycine, alanine, serine, or an amino acid residue which is covalently linked to another amino acid residue of the sequence
  MISC_FEATURE (21)..(21): Xaa is leucine, isoleucine, valine, phenylalanine, methionine, or an amino acid residue which is covalently linked to another amino acid residue of the sequence
  MISC_FEATURE (22)..(22): Xaa is methionine, valine, leucine, isoleucine, alanine, or an amino acid residue which is covalently linked to another amino acid residue of the sequence
  MISC_FEATURE (23)..(23): Xaa is valine, leucine, isoleucine, alanine, methionine, or an amino acid residue which is covalently linked to another amino acid residue of the sequence
  MISC_FEATURE (24)..(24): Xaa is glycine, alanine, serine, or an amino acid residue which is covalently linked to another amino acid residue of the sequence
XXXXXXXAEDXXXXXXXXXXXXXXGV

SEQ ID NO: 794 - protein, 25 aa, Artificial Sequence
  synthetic
  MISC_FEATURE (1)..(1): Xaa is glutamine, asparagine, methionine, serine, or an amino acid which is covalently linked to another amino acid residue of the sequence
  MISC_FEATURE (2)..(2): Xaa is lysine, arginine, or an amino acid residue which is covalently linked to another amino acid residue of the sequence
  MISC_FEATURE (3)..(3): Xaa is leucine, isoleucine, valine, phenylalanine, methionine, or an amino acid residue which is covalently linked to another amino acid residue of the sequence
  MISC_FEATURE (4)..(4): Xaa is valine, leucine, isoleucine, alanine, methionine, or an amino acid residue which is covalently linked to another amino acid residue of the sequence
  MISC_FEATURE (5)..(5): Xaa is phenylalanine, tyrosine, valine, leucine, isoleucine, methionine, or an amino acid residue which is covalently linked to another amino acid residue of the sequence
  MISC_FEATURE (6)..(6): Xaa is phenylalanine, tyrosine, valine, leucine, isoleucine, methionine, or an amino acid residue which is covalently linked to another amino acid residue of the sequence
  MISC_FEATURE (10)..(10): Xaa is valine, leucine, isoleucine, alanine, methionine, or an amino acid residue which is covalently linked to another amino acid residue of the sequence
  MISC_FEATURE (11)..(11): Xaa is glycine, alanine, serine, or an amino acid residue which is covalently linked to another amino acid residue of the sequence
  MISC_FEATURE (12)..(12): Xaa is serine, glycine, alanine, threonine, or an amino acid residue which is covalently linked to another amino acid residue of the sequence
  MISC_FEATURE (13)..(13): Xaa is asparagine, glutamine, methionine, or an amino acid residue which is covalently linked to another amino acid residue of the sequence
  MISC_FEATURE (14)..(14): Xaa is lysine, arginine, or an amino acid residue which is covalently linked to another amino acid residue of the sequence
  MISC_FEATURE (15)..(15): Xaa is glycine, alanine, serine, or an amino acid residue which is covalently linked to another amino acid residue of the sequence
  MISC_FEATURE (16)..(16): Xaa is alanine, valine, glycine, serine, or an amino acid residue which is covalently linked to another amino acid residue of the sequence
  MISC_FEATURE (17)..(17): Xaa is isoleucine, leucine, valine, phenylalanine, methionine, or an amino acid residue which is covalently linked to another amino acid residue of the sequence
  MISC_FEATURE (18)..(18): Xaa is isoleucine, leucine, valine, phenylalanine, methionine, or an amino acid residue which is covalently linked to another amino acid residue of the sequence
  MISC_FEATURE (19)..(19): Xaa is glycine, alanine, serine, or an amino acid residue which is covalently linked to another amino acid residue of the sequence
  MISC_FEATURE (20)..(20): Xaa is leucine, isoleucine, valine, phenylalanine, methionine, or an amino acid residue which is covalently linked to another amino acid residue of the sequence
  MISC_FEATURE (21)..(21): Xaa is methionine, valine, leucine, isoleucine, alanine, or an amino acid residue which is covalently linked to another amino acid residue of the sequence
  MISC_FEATURE (22)..(22): Xaa is valine, leucine, isoleucine, alanine, methionine, or an amino acid residue which is covalently linked to another amino acid residue of the sequence
XXXXXXAEDXXXXXXXXXXXXXGGV

SEQ ID NO: 795 - protein, 24 aa, Artificial Sequence
  synthetic
  MISC_FEATURE (1)..(1): Xaa is lysine, arginine, or an amino acid residue which is covalently linked to another amino acid residue of the sequence
  MISC_FEATURE (2)..(2): Xaa is leucine, isoleucine, valine, phenylalanine, methionine, or an amino acid residue which is covalently linked to another amino acid residue of the sequence
  MISC_FEATURE (3)..(3): Xaa is valine, leucine, isoleucine, alanine, methionine, or an amino acid residue which is covalently linked to another amino acid residue of the sequence
  MISC_FEATURE (4)..(4): Xaa is phenylalanine, tyrosine, valine, leucine, isoleucine, methionine, or an amino acid residue which is covalently linked to another amino acid residue of the sequence
  MISC_FEATURE (5)..(5): Xaa is phenylalanine, tyrosine, valine, leucine, isoleucine, methionine, or an amino acid residue which is covalently linked to another amino acid residue of the sequence
  MISC_FEATURE (9)..(9): Xaa is valine, leucine, isoleucine, alanine, methionine, or an amino acid residue which is covalently linked to another amino acid residue of the sequence
  MISC_FEATURE (10)..(10): Xaa is glycine, alanine, serine, or an amino acid residue which is covalently linked to another amino acid residue of the sequence
  MISC_FEATURE (11)..(11): Xaa is serine, glycine, alanine, threonine, or an amino acid residue which is covalently linked to another amino acid residue of the sequence
  MISC_FEATURE (12)..(12): Xaa is asparagine, glutamine, methionine, or an amino acid residue which is covalently linked to another amino acid residue of the sequence
  MISC_FEATURE (13)..(13): Xaa is lysine, arginine, or an amino acid residue which is covalently linked to another amino acid residue of the sequence
  MISC_FEATURE (14)..(14): Xaa is glycine, alanine, serine, or an amino acid residue which is covalently linked to another amino acid residue of the sequence
  MISC_FEATURE (15)..(15): Xaa is alanine, valine, glycine, serine, or an amino acid residue which is covalently linked to another amino acid residue of the sequence
  MISC_FEATURE (16)..(16): Xaa is isoleucine, leucine, valine, phenylalanine, methionine, or an amino acid residue which is covalently linked to another amino acid residue of the sequence
  MISC_FEATURE (17)..(17): Xaa is isoleucine, leucine, valine, phenylalanine, methionine, or an amino acid residue which is covalently linked to another amino acid residue of the sequence
  MISC_FEATURE (18)..(18): Xaa is glycine, alanine, serine, or an amino acid residue which is covalently linked to another amino acid residue of the sequence
  MISC_FEATURE (19)..(19): Xaa is leucine, isoleucine, valine, phenylalanine, methionine, or an amino acid residue which is covalently linked to another amino acid residue of the sequence
  MISC_FEATURE (20)..(20): Xaa is methionine, valine, leucine, isoleucine, alanine, or an amino acid residue which is covalently linked to another amino acid residue of the sequence
XXXXXAEDXXXXXXXXXXXXVGGV

SEQ ID NO: 796 - protein, 23 aa, Artificial Sequence
  synthetic
  MISC_FEATURE (1)..(1): Xaa is leucine, isoleucine, valine, phenylalanine, methionine, or an amino acid residue which is covalently linked to another amino acid residue of the sequence
  MISC_FEATURE (2)..(2): Xaa is valine, leucine, isoleucine, alanine, methionine, or an amino acid residue which is covalently linked to another amino acid residue of the sequence
  MISC_FEATURE (3)..(3): Xaa is phenylalanine, tyrosine, valine, leucine, isoleucine, methionine, or an amino acid residue which is covalently linked to another amino acid residue of the sequence
  MISC_FEATURE (4)..(4): Xaa is phenylalanine, tyrosine, valine, leucine, isoleucine, methionine, or an amino acid residue which is covalently linked to another amino acid residue of the sequence
  MISC_FEATURE (8)..(8): Xaa is valine, leucine, isoleucine, alanine, methionine, or an amino acid residue which is covalently linked to another amino acid residue of the sequence
  MISC_FEATURE (9)..(9): Xaa is glycine, alanine, serine, or an amino acid residue which is covalently linked to another amino acid residue of the sequence
  MISC_FEATURE (10)..(10): Xaa is serine, glycine, alanine, threonine, or an amino acid residue which is covalently linked to another amino acid residue of the sequence
  MISC_FEATURE (11)..(11): Xaa is asparagine, glutamine, methionine, or an amino acid residue which is covalently linked to another amino acid residue of the sequence
  MISC_FEATURE (12)..(12): Xaa is lysine, arginine, or an amino acid residue which is covalently linked to another amino acid residue of the sequence
  MISC_FEATURE (13)..(13): Xaa is glycine, alanine, serine, or an amino acid residue which is covalently linked to another amino acid residue of the sequence
  MISC_FEATURE (14)..(14): Xaa is alanine, valine, glycine, serine, or an amino acid residue which is covalently linked to another amino acid residue of the sequence
  MISC_FEATURE (15)..(15): Xaa is isoleucine, leucine, valine, phenylalanine, methionine, or an amino acid residue which is covalently linked to another amino acid residue of the sequence
  MISC_FEATURE (16)..(16): Xaa is isoleucine, leucine, valine, phenylalanine, methionine, or an amino acid residue which is covalently linked to another amino acid residue of the sequence
  MISC_FEATURE (17)..(17): Xaa is glycine, alanine, serine, or an amino acid residue which is covalently linked to another amino acid residue of the sequence
  MISC_FEATURE (18)..(18): Xaa is leucine, isoleucine, valine, phenylalanine, methionine, or an amino acid residue which is covalently linked to another amino acid residue of the sequence
XXXXAEDXXXXXXXXXXXMVGGV

SEQ ID NO: 797 - protein, 22 aa, Artificial Sequence
  synthetic
  MISC_FEATURE (1)..(1): Xaa is valine, leucine, isoleucine, alanine, methionine, or an amino acid residue which is covalently linked to another amino acid residue of the sequence
  MISC_FEATURE (2)..(2): Xaa is phenylalanine, tyrosine, valine, leucine, isoleucine, methionine, or an amino acid residue which is covalently linked to another amino acid residue of the sequence
  MISC_FEATURE (3)..(3): Xaa is phenylalanine, tyrosine, valine, leucine, isoleucine, methionine, or an amino acid residue which is covalently linked to another amino acid residue of the sequence
  MISC_FEATURE (7)..(7): Xaa is valine, leucine, isoleucine, alanine, methionine, or an amino acid residue which is covalently linked to another amino acid residue of the sequence
  MISC_FEATURE (8)..(8): Xaa is glycine, alanine, serine, or an amino acid residue which is covalently linked to another amino acid residue of the sequence
  MISC_FEATURE (9)..(9): Xaa is serine, glycine, alanine, threonine, or an amino acid residue which is covalently linked to another amino acid residue of the sequence
  MISC_FEATURE (10)..(10): Xaa is asparagine, glutamine, methionine, or an amino acid residue which is covalently linked to another amino acid residue of the sequence
  MISC_FEATURE (11)..(11): Xaa is lysine, arginine, or an amino acid residue which is covalently linked to another amino acid residue of the sequence
  MISC_FEATURE (12)..(12): Xaa is glycine, alanine, serine, or an amino acid residue which is covalently linked to another amino acid residue of the sequence
  MISC_FEATURE (13)..(13): Xaa is alanine, valine, glycine, serine, or an amino acid residue which is covalently linked to another amino acid residue of the sequence
  MISC_FEATURE (14)..(14): Xaa is isoleucine, leucine, valine, phenylalanine, methionine, or an amino acid residue which is covalently linked to another amino acid residue of the sequence
  MISC_FEATURE (15)..(15): Xaa is isoleucine, leucine, valine, phenylalanine, methionine, or an amino acid residue which is covalently linked to another amino acid residue of the sequence
  MISC_FEATURE (16)..(16): Xaa is glycine, alanine, serine, or an amino acid residue which is covalently linked to another amino acid residue of the sequence
XXXAEDXXXXXXXXXXLMVGGV

SEQ ID NO: 798 - protein, 21 aa, Artificial Sequence
  synthetic
  MISC_FEATURE (1)..(1): Xaa is phenylalanine, tyrosine, valine, leucine, isoleucine, methionine, or an amino acid residue which is covalently linked to another amino acid residue of the sequence
  MISC_FEATURE (2)..(2): Xaa is phenylalanine, tyrosine, valine, leucine, isoleucine, methionine, or an amino acid residue which is covalently linked to another amino acid residue of the sequence
  MISC_FEATURE (6)..(6): Xaa is valine, leucine, isoleucine, alanine, methionine, or an amino acid residue which is covalently linked to another amino acid residue of the sequence
  MISC_FEATURE (7)..(7): Xaa is glycine, alanine, serine, or an amino acid residue which is covalently linked to another amino acid residue of the sequence
  MISC_FEATURE (8)..(8): Xaa is serine, glycine, alanine, threonine, or an amino acid residue which is covalently linked to another amino acid residue of the sequence
  MISC_FEATURE (9)..(9): Xaa is asparagine, glutamine, methionine, or an amino acid residue which is covalently linked to another amino acid residue of the sequence
  MISC_FEATURE (10)..(10): Xaa is lysine, arginine, or an amino acid residue which is covalently linked to another amino acid residue of the sequence
  MISC_FEATURE (11)..(11): Xaa is glycine, alanine, serine, or an amino acid residue which is covalently linked to another amino acid residue of the sequence
  MISC_FEATURE (12)..(12): Xaa is alanine, valine, glycine, serine, or an amino acid residue which is covalently linked to another amino acid residue of the sequence
  MISC_FEATURE (13)..(13): Xaa is isoleucine, leucine, valine, phenylalanine, methionine, or an amino acid residue which is covalently linked to another amino acid residue of the sequence
  MISC_FEATURE (14)..(14): Xaa is isoleucine, leucine, valine, phenylalanine, methionine, or an amino acid residue which is covalently linked to another amino acid residue of the sequence
XXAEDXXXXXXXXXGLMVGGV

SEQ ID NO: 799 - protein, 20 aa, Artificial Sequence
  synthetic
  MISC_FEATURE (1)..(1): Xaa is phenylalanine, tyrosine, valine, leucine, isoleucine, methionine, or an amino acid residue which is covalently linked to another amino acid residue of the sequence
  MISC_FEATURE (5)..(5): Xaa is valine, leucine, isoleucine, alanine, methionine, or an amino acid residue which is covalently linked to another amino acid residue of the sequence
  MISC_FEATURE (6)..(6): Xaa is glycine, alanine, serine, or an amino acid residue which is covalently linked to another amino acid residue of the sequence
  MISC_FEATURE (7)..(7): Xaa is serine, glycine, alanine, threonine, or an amino acid residue which is covalently linked to another amino acid residue of the sequence
  MISC_FEATURE (8)..(8): Xaa is asparagine, glutamine, methionine, or an amino acid residue which is covalently linked to another amino acid residue of the sequence
  MISC_FEATURE (9)..(9): Xaa is lysine, arginine, or an amino acid residue which is covalently linked to another amino acid residue of the sequence
  MISC_FEATURE (10)..(10): Xaa is glycine, alanine, serine, or an amino acid residue which is covalently linked to another amino acid residue of the sequence
  MISC_FEATURE (11)..(11): Xaa is alanine, valine, glycine, serine, or an amino acid residue which is covalently linked to another amino acid residue of the sequence
  MISC_FEATURE (12)..(12): Xaa is isoleucine, leucine, valine, phenylalanine, methionine, or an amino acid residue which is covalently linked to another amino acid residue of the sequence
  MISC_FEATURE (32)..(32): Xaa is isoleucine, leucine, valine, phenylalanine, methionine, or an amino acid residue which is covalently linked to another amino acid residue of the sequence
XAEDXXXXXXXXIGLMVGGV

SEQ ID NO: 800 - protein, 38 aa, Artificial Sequence
  synthetic
  MISC_FEATURE (13)..(13): Xaa is histidine, tyrosine, serine, methionine, or an amino acid residue which is covalently linked to another amino acid residue of the sequence
  MISC_FEATURE (14)..(14): Xaa is histidine, tyrosine, serine, methionine, or an amino acid residue which is covalently linked to another amino acid residue of the sequence
  MISC_FEATURE (15)..(15): Xaa is glutamine, asparagine, methionine, serine, or an amino acid which is covalently linked to another amino acid residue of the sequence
  MISC_FEATURE (16)..(16): Xaa is lysine, arginine, or an amino acid residue which is covalently linked to another amino acid residue of the sequence
  MISC_FEATURE (17)..(17): Xaa is leucine, isoleucine, valine, phenylalanine, methionine, or an amino acid residue which is covalently linked to another amino acid residue of the sequence
  MISC_FEATURE (18)..(18): Xaa is valine, leucine, isoleucine, alanine, methionine, or an amino acid residue which is covalently linked to another amino acid residue of the sequence
  MISC_FEATURE (19)..(19): Xaa is phenylalanine, tyrosine, valine, leucine, isoleucine, methionine, or an amino acid residue which is covalently linked to another amino acid residue of the sequence
  MISC_FEATURE (20)..(20): Xaa is phenylalanine, tyrosine, valine, leucine, isoleucine, methionine, or an amino acid residue which is covalently linked to another amino acid residue of the sequence
  MISC_FEATURE (24)..(24): Xaa is valine, leucine, isoleucine, alanine, methionine, or an amino acid residue which is covalently linked to another amino acid residue of the sequence
  MISC_FEATURE (25)..(25): Xaa is glycine, alanine, serine, or an amino acid residue which is covalently linked to another amino acid residue of the sequence
  MISC_FEATURE (26)..(26): Xaa is serine, glycine, alanine, threonine, or an amino acid residue which is covalently linked to another amino acid residue of the sequence
  MISC_FEATURE (27)..(27): Xaa is asparagine, glutamine, methionine, or an amino acid residue which is covalently linked to another amino acid residue of the sequence
  MISC_FEATURE (28)..(28): Xaa is lysine, arginine, or an amino acid residue which is covalently linked to another amino acid residue of the sequence
  MISC_FEATURE (29)..(29): Xaa is glycine, alanine, serine, or an amino acid residue which is covalently linked to another amino acid residue of the sequence
  MISC_FEATURE (30)..(30): Xaa is alanine, valine, glycine, serine, or an amino acid residue which is covalently linked to another amino acid residue of the sequence
  MISC_FEATURE (31)..(31): Xaa is isoleucine, leucine, valine, phenylalanine, methionine, or an amino acid residue which is covalently linked to another amino acid residue of the sequence
  MISC_FEATURE (32)..(32): Xaa is isoleucine, leucine, valine, phenylalanine, methionine, or an amino acid residue which is covalently linked to another amino acid residue of the sequence
  MISC_FEATURE (33)..(33): Xaa is glycine, alanine, serine, or an amino acid residue which is covalently linked to another amino acid residue of the sequence
  MISC_FEATURE (34)..(34): Xaa is leucine, isoleucine, valine, phenylalanine, methionine, or an amino acid residue which is covalently linked to another amino acid residue of the sequence
  MISC_FEATURE (35)..(35): Xaa is methionine, valine, leucine, isoleucine, alanine, or an amino acid residue which is covalently linked to another amino acid residue of the sequence
  MISC_FEATURE (36)..(36): Xaa is valine, leucine, isoleucine, alanine, methionine, or an amino acid residue which is covalently linked to another amino acid residue of the sequence
  MISC_FEATURE (37)..(37): Xaa is glycine, alanine, serine, or an amino acid residue which is covalently linked to another amino acid residue of the sequence
  MISC_FEATURE (38)..(38): Xaa is glycine, alanine, serine, or an amino acid residue which is covalently linked to another amino acid residue of the sequence
DAEFRHDSGYEVXXXXXXXXAEDXXXXXXXXXXXXXXX

SEQ ID NO: 801 - protein, 37 aa, Artificial Sequence
  synthetic
  MISC_FEATURE (12)..(12): Xaa is histidine, tyrosine, serine, methionine, or an amino acid residue which is covalently linked to another amino acid residue of the sequence
  MISC_FEATURE (13)..(13): Xaa is histidine, tyrosine, serine, methionine, or an amino acid residue which is covalently linked to another amino acid residue of the sequence
  MISC_FEATURE (14)..(14): Xaa is glutamine, asparagine, methionine, serine, or an amino acid which is covalently linked to another amino acid residue of the sequence
  MISC_FEATURE (15)..(15): Xaa is lysine, arginine, or an amino acid residue which is covalently linked to another amino acid residue of the sequence
  MISC_FEATURE (16)..(16): Xaa is leucine, isoleucine, valine, phenylalanine, methionine, or an amino acid residue which is covalently linked to another amino acid residue of the sequence
  MISC_FEATURE (17)..(17): Xaa is valine, leucine, isoleucine, alanine, methionine, or an amino acid residue which is covalently linked to another amino acid residue of the sequence
  MISC_FEATURE (18)..(18): Xaa is phenylalanine, tyrosine, valine, leucine, isoleucine, methionine, or an amino acid residue which is covalently linked to another amino acid residue of the sequence
  MISC_FEATURE (19)..(19): Xaa is phenylalanine, tyrosine, valine, leucine, isoleucine, methionine, or an amino acid residue which is covalently linked to another amino acid residue of the sequence
  MISC_FEATURE (23)..(23): Xaa is valine, leucine, isoleucine, alanine, methionine, or an amino acid residue which is covalently linked to another amino acid residue of the sequence
  MISC_FEATURE (24)..(24): Xaa is glycine, alanine, serine, or an amino acid residue which is covalently linked to another amino acid residue of the sequence
  MISC_FEATURE (25)..(25): Xaa is serine, glycine, alanine, threonine, or an amino acid residue which is covalently linked to another amino acid residue of the sequence
  MISC_FEATURE (26)..(26): Xaa is asparagine, glutamine, methionine, or an amino acid residue which is covalently linked to another amino acid residue of the sequence
  MISC_FEATURE (27)..(27): Xaa is lysine, arginine, or an amino acid residue which is covalently linked to another amino acid residue of the sequence
  MISC_FEATURE (28)..(28): Xaa is glycine, alanine, serine, or an amino acid residue which is covalently linked to another amino acid residue of the sequence
  MISC_FEATURE (29)..(29): Xaa is alanine, valine, glycine, serine, or an amino acid residue which is covalently linked to another amino acid residue of the sequence
  MISC_FEATURE (30)..(30): Xaa is isoleucine, leucine, valine, phenylalanine, methionine, or an amino acid residue which is covalently linked to another amino acid residue of the sequence
  MISC_FEATURE (31)..(31): Xaa is isoleucine, leucine, valine, phenylalanine, methionine, or an amino acid residue which is covalently linked to another amino acid residue of the sequence
  MISC_FEATURE (32)..(32): Xaa is glycine, alanine, serine, or an amino acid residue which is covalently linked to another amino acid residue of the sequence
  MISC_FEATURE (33)..(33): Xaa is leucine, isoleucine, valine, phenylalanine, methionine, or an amino acid residue which is covalently linked to another amino acid residue of the sequence
  MISC_FEATURE (34)..(34): Xaa is methionine, valine, leucine, isoleucine, alanine, or an amino acid residue which is covalently linked to another amino acid residue of the sequence
  MISC_FEATURE (35)..(35): Xaa is valine, leucine, isoleucine, alanine, methionine, or an amino acid residue which is covalently linked to another amino acid residue of the sequence
  MISC_FEATURE (36)..(36): Xaa is glycine, alanine, serine, or an amino acid residue which is covalently linked to another amino acid residue of the sequence
  MISC_FEATURE (37)..(37): Xaa is glycine, alanine, serine, or an amino acid residue which is covalently linked to another amino acid residue of the sequence
AEFRHDSGYEVXXXXXXXXAEDXXXXXXXXXXXXXXX

SEQ ID NO: 802 - protein, 36 aa, Artificial Sequence
  synthetic
  MISC_FEATURE (11)..(11): Xaa is histidine, tyrosine, serine, methionine, or an amino acid residue which is covalently linked to another amino acid residue of the sequence
  MISC_FEATURE (12)..(12): Xaa is histidine, tyrosine, serine, methionine, or an amino acid residue which is covalently linked to another amino acid residue of the sequence
  MISC_FEATURE (13)..(13): Xaa is glutamine, asparagine, methionine, serine, or an amino acid which is covalently linked to another amino acid residue of the sequence
  MISC_FEATURE (14)..(14): Xaa is lysine, arginine, or an amino acid residue which is covalently linked to another amino acid residue of the sequence
  MISC_FEATURE (15)..(15): Xaa is leucine, isoleucine, valine, phenylalanine, methionine, or an amino acid residue which is covalently linked to another amino acid residue of the sequence
  MISC_FEATURE (16)..(16): Xaa is valine, leucine, isoleucine, alanine, methionine, or an amino acid residue which is covalently linked to another amino acid residue of the sequence
  MISC_FEATURE (17)..(17): Xaa is phenylalanine, tyrosine, valine, leucine, isoleucine, methionine, or an amino acid residue which is covalently linked to another amino acid residue of the sequence
  MISC_FEATURE (18)..(18): Xaa is phenylalanine, tyrosine, valine, leucine, isoleucine, methionine, or an amino acid residue which is covalently linked to another amino acid residue of the sequence
  MISC_FEATURE (22)..(22): Xaa is valine, leucine, isoleucine, alanine, methionine, or an amino acid residue which is covalently linked to another amino acid residue of the sequence
  MISC_FEATURE (23)..(23): Xaa is glycine, alanine, serine, or an amino acid residue which is covalently linked to another amino acid residue of the sequence
  MISC_FEATURE (24)..(24): Xaa is serine, glycine, alanine, threonine, or an amino acid residue which is covalently linked to another amino acid residue of the sequence
  MISC_FEATURE (25)..(25): Xaa is asparagine, glutamine, methionine, or an amino acid residue which is covalently linked to another amino acid residue of the sequence
  MISC_FEATURE (26)..(26): Xaa is lysine, arginine, or an amino acid residue which is covalently linked to another amino acid residue of the sequence
  MISC_FEATURE (27)..(27): Xaa is glycine, alanine, serine, or an amino acid residue which is covalently linked to another amino acid residue of the sequence
  MISC_FEATURE (28)..(28): Xaa is alanine, valine, glycine, serine, or an amino acid residue which is covalently linked to another amino acid residue of the sequence
  MISC_FEATURE (29)..(29): Xaa is isoleucine, leucine, valine, phenylalanine, methionine, or an amino acid residue which is covalently linked to another amino acid residue of the sequence
  MISC_FEATURE (30)..(30): Xaa is isoleucine, leucine, valine, phenylalanine, methionine, or an amino acid residue which is covalently linked to another amino acid residue of the sequence
  MISC_FEATURE (31)..(31): Xaa is glycine, alanine, serine, or an amino acid residue which is covalently linked to another amino acid residue of the sequence
  MISC_FEATURE (32)..(32): Xaa is leucine, isoleucine, valine, phenylalanine, methionine, or an amino acid residue which is covalently linked to another amino acid residue of the sequence
  MISC_FEATURE (33)..(33): Xaa is methionine, valine, leucine, isoleucine, alanine, or an amino acid residue which is covalently linked to another amino acid residue of the sequence
  MISC_FEATURE (34)..(34): Xaa is valine, leucine, isoleucine, alanine, methionine, or an amino acid residue which is covalently linked to another amino acid residue of the sequence
  MISC_FEATURE (35)..(35): Xaa is glycine, alanine, serine, or an amino acid residue which is covalently linked to another amino acid residue of the sequence
  MISC_FEATURE (36)..(36): Xaa is glycine, alanine, serine, or an amino acid residue which is covalently linked to another amino acid residue of the sequence
EFRHDSGYEVXXXXXXXXAEDXXXXXXXXXXXXXXX

SEQ ID NO: 803 - protein, 35 aa, Artificial Sequence
  synthetic
  MISC_FEATURE (10)..(10): Xaa is histidine, tyrosine, serine, methionine, or an amino acid residue which is covalently linked to another amino acid residue of the sequence
  MISC_FEATURE (11)..(11): Xaa is histidine, tyrosine, serine, methionine, or an amino acid residue which is covalently linked to another amino acid residue of the sequence
  MISC_FEATURE (12)..(12): Xaa is glutamine, asparagine, methionine, serine, or an amino acid which is covalently linked to another amino acid residue of the sequence
  MISC_FEATURE (13)..(13): Xaa is lysine, arginine, or an amino acid residue which is covalently linked to another amino acid residue of the sequence
  MISC_FEATURE (14)..(14): Xaa is leucine, isoleucine, valine, phenylalanine, methionine, or an amino acid residue which is covalently linked to another amino acid residue of the sequence
  MISC_FEATURE (15)..(15): Xaa is valine, leucine, isoleucine, alanine, methionine, or an amino acid residue which is covalently linked to another amino acid residue of the sequence
  MISC_FEATURE (16)..(16): Xaa is phenylalanine, tyrosine, valine, leucine, isoleucine, methionine, or an amino acid residue which is covalently linked to another amino acid residue of the sequence
  MISC_FEATURE (17)..(17): Xaa is phenylalanine, tyrosine, valine, leucine, isoleucine, methionine, or an amino acid residue which is covalently linked to another amino acid residue of the sequence
  MISC_FEATURE (21)..(21): Xaa is valine, leucine, isoleucine, alanine, methionine, or an amino acid residue which is covalently linked to another amino acid residue of the sequence
  MISC_FEATURE (22)..(22): Xaa is glycine, alanine, serine, or an amino acid residue which is covalently linked to another amino acid residue of the sequence
  MISC_FEATURE (23)..(23): Xaa is serine, glycine, alanine, threonine, or an amino acid residue which is covalently linked to another amino acid residue of the sequence
  MISC_FEATURE (24)..(24): Xaa is asparagine, glutamine, methionine, or an amino acid residue which is covalently linked to another amino acid residue of the sequence
  MISC_FEATURE (25)..(25): Xaa is lysine, arginine, or an amino acid residue which is covalently linked to another amino acid residue of the sequence
  MISC_FEATURE (26)..(26): Xaa is glycine, alanine, serine, or an amino acid residue which is covalently linked to another amino acid residue of the sequence
  MISC_FEATURE (27)..(27): Xaa is alanine, valine, glycine, serine, or an amino acid residue which is covalently linked to another amino acid residue of the sequence
  MISC_FEATURE (28)..(28): Xaa is isoleucine, leucine, valine, phenylalanine, methionine, or an amino acid residue which is covalently linked to another amino acid residue of the sequence
  MISC_FEATURE (29)..(29): Xaa is isoleucine, leucine, valine, phenylalanine, methionine, or an amino acid residue which is covalently linked to another amino acid residue of the sequence
  MISC_FEATURE (30)..(30): Xaa is glycine, alanine, serine, or an amino acid residue which is covalently linked to another amino acid residue of the sequence
  MISC_FEATURE (31)..(31): Xaa is leucine, isoleucine, valine, phenylalanine, methionine, or an amino acid residue which is covalently linked to another amino acid residue of the sequence
  MISC_FEATURE (32)..(32): Xaa is methionine, valine, leucine, isoleucine, alanine, or an amino acid residue which is covalently linked to another amino acid residue of the sequence
  MISC_FEATURE (33)..(33): Xaa is valine, leucine, isoleucine, alanine, methionine, or an amino acid residue which is covalently linked to another amino acid residue of the sequence
  MISC_FEATURE (34)..(34): Xaa is glycine, alanine, serine, or an amino acid residue which is covalently linked to another amino acid residue of the sequence
  MISC_FEATURE (35)..(35): Xaa is glycine, alanine, serine, or an amino acid residue which is covalently linked to another amino acid residue of the sequence
FRHDSGYEVXXXXXXXXAEDXXXXXXXXXXXXXXX

SEQ ID NO: 804 - protein, 34 aa, Artificial Sequence
  synthetic
  MISC_FEATURE (9)..(9): Xaa is histidine, tyrosine, serine, methionine, or an amino acid residue which is covalently linked to another amino acid residue of the sequence
  MISC_FEATURE (10)..(10): Xaa is histidine, tyrosine, serine, methionine, or an amino acid residue which is covalently linked to another amino acid residue of the sequence
  MISC_FEATURE (11)..(11): Xaa is glutamine, asparagine, methionine, serine, or an amino acid which is covalently linked to another amino acid residue of the sequence
  MISC_FEATURE (12)..(12): Xaa is lysine, arginine, or an amino acid residue which is covalently linked to another amino acid residue of the sequence
  MISC_FEATURE (13)..(13): Xaa is leucine, isoleucine, valine, phenylalanine, methionine, or an amino acid residue which is covalently linked to another amino acid residue of the sequence
  MISC_FEATURE (14)..(14): Xaa is valine, leucine, isoleucine, alanine, methionine, or an amino acid residue which is covalently linked to another amino acid residue of the sequence
  MISC_FEATURE (15)..(15): Xaa is phenylalanine, tyrosine, valine, leucine, isoleucine, methionine, or an amino acid residue which is covalently linked to another amino acid residue of the sequence
  MISC_FEATURE (16)..(16): Xaa is phenylalanine, tyrosine, valine, leucine, isoleucine, methionine, or an amino acid residue which is covalently linked to another amino acid residue of the sequence
  MISC_FEATURE (20)..(20): Xaa is valine, leucine, isoleucine, alanine, methionine, or an amino acid residue which is covalently linked to another amino acid residue of the sequence
  MISC_FEATURE (21)..(21): Xaa is glycine, alanine, serine, or an amino acid residue which is covalently linked to another amino acid residue of the sequence
  MISC_FEATURE (22)..(22): Xaa is serine, glycine, alanine, threonine, or an amino acid residue which is covalently linked to another amino acid residue of the sequence
  MISC_FEATURE (23)..(23): Xaa is asparagine, glutamine, methionine, or an amino acid residue which is covalently linked to another amino acid residue of the sequence
  MISC_FEATURE (24)..(24): Xaa is lysine, arginine, or an amino acid residue which is covalently linked to another amino acid residue of the sequence
  MISC_FEATURE (25)..(25): Xaa is glycine, alanine, serine, or an amino acid residue which is covalently linked to another amino acid residue of the sequence
  MISC_FEATURE (26)..(26): Xaa is alanine, valine, glycine, serine, or an amino acid residue which is covalently linked to another amino acid residue of the sequence
  MISC_FEATURE (27)..(27): Xaa is isoleucine, leucine, valine, phenylalanine, methionine, or an amino acid residue which is covalently linked to another amino acid residue of the sequence
  MISC_FEATURE (28)..(28): Xaa is isoleucine, leucine, valine, phenylalanine, methionine, or an amino acid residue which is covalently linked to another amino acid residue of the sequence
  MISC_FEATURE (29)..(29): Xaa is glycine, alanine, serine, or an amino acid residue which is covalently linked to another amino acid residue of the sequence
  MISC_FEATURE (30)..(30): Xaa is leucine, isoleucine, valine, phenylalanine, methionine, or an amino acid residue which is covalently linked to another amino acid residue of the sequence
  MISC_FEATURE (31)..(31): Xaa is methionine, valine, leucine, isoleucine, alanine, or an amino acid residue which is covalently linked to another amino acid residue of the sequence
  MISC_FEATURE (32)..(32): Xaa is valine, leucine, isoleucine, alanine, methionine, or an amino acid residue which is covalently linked to another amino acid residue of the sequence
  MISC_FEATURE (33)..(33): Xaa is glycine, alanine, serine, or an amino acid residue which is covalently linked to another amino acid residue of the sequence
  MISC_FEATURE (34)..(34): Xaa is glycine, alanine, serine, or an amino acid residue which is covalently linked to another amino acid residue of the sequence
RHDSGYEVXXXXXXXXAEDXXXXXXXXXXXXXXX

SEQ ID NO: 805 - protein, 33 aa, Artificial Sequence
  synthetic
  MISC_FEATURE (8)..(8): Xaa is histidine, tyrosine, serine, methionine, or an amino acid residue which is covalently linked to another amino acid residue of the sequence
  MISC_FEATURE (9)..(9): Xaa is histidine, tyrosine, serine, methionine, or an amino acid residue which is covalently linked to another amino acid residue of the sequence
  MISC_FEATURE (10)..(10): Xaa is glutamine, asparagine, methionine, serine, or an amino acid which is covalently linked to another amino acid residue of the sequence
  MISC_FEATURE (11)..(11): Xaa is lysine, arginine, or an amino acid residue which is covalently linked to another amino acid residue of the sequence
  MISC_FEATURE (12)..(12): Xaa is leucine, isoleucine, valine, phenylalanine, methionine, or an amino acid residue which is covalently linked to another amino acid residue of the sequence
  MISC_FEATURE (13)..(13): Xaa is valine, leucine, isoleucine, alanine, methionine, or an amino acid residue which is covalently linked to another amino acid residue of the sequence
  MISC_FEATURE (14)..(14): Xaa is phenylalanine, tyrosine, valine, leucine, isoleucine, methionine, or an amino acid residue which is covalently linked to another amino acid residue of the sequence
  MISC_FEATURE (15)..(15): Xaa is phenylalanine, tyrosine, valine, leucine, isoleucine, methionine, or an amino acid residue which is covalently linked to another amino acid residue of the sequence
  MISC_FEATURE (19)..(19): Xaa is valine, leucine, isoleucine, alanine, methionine, or an amino acid residue which is covalently linked to another amino acid residue of the sequence
  MISC_FEATURE (20)..(20): Xaa is glycine, alanine, serine, or an amino acid residue which is covalently linked to another amino acid residue of the sequence
  MISC_FEATURE (21)..(21): Xaa is serine, glycine, alanine, threonine, or an amino acid residue which is covalently linked to another amino acid residue of the sequence
  MISC_FEATURE (22)..(22): Xaa is asparagine, glutamine, methionine, or an amino acid residue which is covalently linked to another amino acid residue of the sequence
  MISC_FEATURE (23)..(23): Xaa is lysine, arginine, or an amino acid residue which is covalently linked to another amino acid residue of the sequence
  MISC_FEATURE (24)..(24): Xaa is glycine, alanine, serine, or an amino acid residue which is covalently linked to another amino acid residue of the sequence
  MISC_FEATURE (25)..(25): Xaa is alanine, valine, glycine, serine, or an amino acid residue which is covalently linked to another amino acid residue of the sequence
  MISC_FEATURE (26)..(26): Xaa is isoleucine, leucine, valine, phenylalanine, methionine, or an amino acid residue which is covalently linked to another amino acid residue of the sequence
  MISC_FEATURE (27)..(27): Xaa is isoleucine, leucine, valine, phenylalanine, methionine, or an amino acid residue which is covalently linked to another amino acid residue of the sequence
  MISC_FEATURE (28)..(28): Xaa is glycine, alanine, serine, or an amino acid residue which is covalently linked to another amino acid residue of the sequence
  MISC_FEATURE (29)..(29): Xaa is leucine, isoleucine, valine, phenylalanine, methionine, or an amino acid residue which is covalently linked to another amino acid residue of the sequence
  MISC_FEATURE (30)..(30): Xaa is methionine, valine, leucine, isoleucine, alanine, or an amino acid residue which is covalently linked to another amino acid residue of the sequence
  MISC_FEATURE (31)..(31): Xaa is valine, leucine, isoleucine, alanine, methionine, or an amino acid residue which is covalently linked to another amino acid residue of the sequence
  MISC_FEATURE (32)..(32): Xaa is glycine, alanine, serine, or an amino acid residue which is covalently linked to another amino acid residue of the sequence
  MISC_FEATURE (33)..(33): Xaa is glycine, alanine, serine, or an amino acid residue which is covalently linked to another amino acid residue of the sequence
HDSGYEVXXXXXXXXAEDXXXXXXXXXXXXXXX

SEQ ID NO: 806 - protein, 32 aa, Artificial Sequence
  synthetic
  MISC_FEATURE (7)..(7): Xaa is histidine, tyrosine, serine, methionine, or an amino acid residue which is covalently linked to another amino acid residue of the sequence
  MISC_FEATURE (8)..(8): Xaa is histidine, tyrosine, serine, methionine, or an amino acid residue which is covalently linked to another amino acid residue of the sequence
  MISC_FEATURE (9)..(9): Xaa is glutamine, asparagine, methionine, serine, or an amino acid which is covalently linked to another amino acid residue of the sequence
  MISC_FEATURE (10)..(10): Xaa is lysine, arginine, or an amino acid residue which is covalently linked to another amino acid residue of the sequence
  MISC_FEATURE (11)..(11): Xaa is leucine, isoleucine, valine, phenylalanine, methionine, or an amino acid residue which is covalently linked to another amino acid residue of the sequence
  MISC_FEATURE (12)..(12): Xaa is valine, leucine, isoleucine, alanine, methionine, or an amino acid residue which is covalently linked to another amino acid residue of the sequence
  MISC_FEATURE (13)..(13): Xaa is phenylalanine, tyrosine, valine, leucine, isoleucine, methionine, or an amino acid residue which is covalently linked to another amino acid residue of the sequence
  MISC_FEATURE (14)..(14): Xaa is phenylalanine, tyrosine, valine, leucine, isoleucine, methionine, or an amino acid residue which is covalently linked to another amino acid residue of the sequence
  MISC_FEATURE (18)..(18): Xaa is valine, leucine, isoleucine, alanine, methionine, or an amino acid residue which is covalently linked to another amino acid residue of the sequence
  MISC_FEATURE (19)..(19): Xaa is glycine, alanine, serine, or an amino acid residue which is covalently linked to another amino acid residue of the sequence
  MISC_FEATURE (20)..(20): Xaa is serine, glycine, alanine, threonine, or an amino acid residue which is covalently linked to another amino acid residue of the sequence
  MISC_FEATURE (21)..(21): Xaa is asparagine, glutamine, methionine, or an amino acid residue which is covalently linked to another amino acid residue of the sequence
  MISC_FEATURE (22)..(22): Xaa is lysine, arginine, or an amino acid residue which is covalently linked to another amino acid residue of the sequence
  MISC_FEATURE (23)..(23): Xaa is glycine, alanine, serine, or an amino acid residue which is covalently linked to another amino acid residue of the sequence
  MISC_FEATURE (24)..(24): Xaa is alanine, valine, glycine, serine, or an amino acid residue which is covalently linked to another amino acid residue of the sequence
  MISC_FEATURE (25)..(25): Xaa is isoleucine, leucine, valine, phenylalanine, methionine, or an amino acid residue which is covalently linked to another amino acid residue of the sequence
  MISC_FEATURE (26)..(26): Xaa is isoleucine, leucine, valine, phenylalanine, methionine, or an amino acid residue which is covalently linked to another amino acid residue of the sequence
  MISC_FEATURE (27)..(27): Xaa is glycine, alanine, serine, or an amino acid residue which is covalently linked to another amino acid residue of the sequence
  MISC_FEATURE (28)..(28): Xaa is leucine, isoleucine, valine, phenylalanine, methionine, or an amino acid residue which is covalently linked to another amino acid residue of the sequence
  MISC_FEATURE (29)..(29): Xaa is methionine, valine, leucine, isoleucine, alanine, or an amino acid residue which is covalently linked to another amino acid residue of the sequence
  MISC_FEATURE (30)..(30): Xaa is valine, leucine, isoleucine, alanine, methionine, or an amino acid residue which is covalently linked to another amino acid residue of the sequence
  MISC_FEATURE (31)..(31): Xaa is glycine, alanine, serine, or an amino acid residue which is covalently linked to another amino acid residue of the sequence
  MISC_FEATURE (32)..(32): Xaa is glycine, alanine, serine, or an amino acid residue which is covalently linked to another amino acid residue of the sequence
DSGYEVXXXXXXXXAEDXXXXXXXXXXXXXXX

SEQ ID NO: 807 - protein, 31 aa, Artificial Sequence
  synthetic
  MISC_FEATURE (6)..(6): Xaa is histidine, tyrosine, serine, methionine, or an amino acid residue which is covalently linked to another amino acid residue of the sequence
  MISC_FEATURE (7)..(7): Xaa is histidine, tyrosine, serine, methionine, or an amino acid residue which is covalently linked to another amino acid residue of the sequence
  MISC_FEATURE (8)..(8): Xaa is glutamine, asparagine, methionine, serine, or an amino acid which is covalently linked to another amino acid residue of the sequence
  MISC_FEATURE (9)..(9): Xaa is lysine, arginine, or an amino acid residue which is covalently linked to another amino acid residue of the sequence
  MISC_FEATURE (10)..(10): Xaa is leucine, isoleucine, valine, phenylalanine, methionine, or an amino acid residue which is covalently linked to another amino acid residue of the sequence
  MISC_FEATURE (11)..(11): Xaa is valine, leucine, isoleucine, alanine, methionine, or an amino acid residue which is covalently linked to another amino acid residue of the sequence
  MISC_FEATURE (12)..(12): Xaa is phenylalanine, tyrosine, valine, leucine, isoleucine, methionine, or an amino acid residue which is covalently linked to another amino acid residue of the sequence
  MISC_FEATURE (13)..(13): Xaa is phenylalanine, tyrosine, valine, leucine, isoleucine, methionine, or an amino acid residue which is covalently linked to another amino acid residue of the sequence
  MISC_FEATURE (17)..(17): Xaa is valine, leucine, isoleucine, alanine, methionine, or an amino acid residue which is covalently linked to another amino acid residue of the sequence
  MISC_FEATURE (18)..(18): Xaa is glycine, alanine, serine, or an amino acid residue which is covalently linked to another amino acid residue of the sequence
  MISC_FEATURE (19)..(19): Xaa is serine, glycine, alanine, threonine, or an amino acid residue which is covalently linked to another amino acid residue of the sequence
  MISC_FEATURE (20)..(20): Xaa is asparagine, glutamine, methionine, or an amino acid residue which is covalently linked to another amino acid residue of the sequence
  MISC_FEATURE (21)..(21): Xaa is lysine, arginine, or an amino acid residue which is covalently linked to another amino acid residue of the sequence
  MISC_FEATURE (22)..(22): Xaa is glycine, alanine, serine, or an amino acid residue which is covalently linked to another amino acid residue of the sequence
  MISC_FEATURE (23)..(23): Xaa is alanine, valine, glycine, serine, or an amino acid residue which is covalently linked to another amino acid residue of the sequence
  MISC_FEATURE (24)..(24): Xaa is isoleucine, leucine, valine, phenylalanine, methionine, or an amino acid residue which is covalently linked to another amino acid residue of the sequence
  MISC_FEATURE (25)..(25): Xaa is isoleucine, leucine, valine, phenylalanine, methionine, or an amino acid residue which is covalently linked to another amino acid residue of the sequence
  MISC_FEATURE (26)..(26): Xaa is glycine, alanine, serine, or an amino acid residue which is covalently linked to another amino acid residue of the sequence
  MISC_FEATURE (27)..(27): Xaa is leucine, isoleucine, valine, phenylalanine, methionine, or an amino acid residue which is covalently linked to another amino acid residue of the sequence
  MISC_FEATURE (28)..(28): Xaa is methionine, valine, leucine, isoleucine, alanine, or an amino acid residue which is covalently linked to another amino acid residue of the sequence
  MISC_FEATURE (29)..(29): Xaa is valine, leucine, isoleucine, alanine, methionine, or an amino acid residue which is covalently linked to another amino acid residue of the sequence
  MISC_FEATURE (30)..(30): Xaa is glycine, alanine, serine, or an amino acid residue which is covalently linked to another amino acid residue of the sequence
  MISC_FEATURE (31)..(31): Xaa is glycine, alanine, serine, or an amino acid residue which is covalently linked to another amino acid residue of the sequence
SGYEVXXXXXXXXAEDXXXXXXXXXXXXXXX

SEQ ID NO: 808 - protein, 30 aa, Artificial Sequence
  synthetic
  MISC_FEATURE (5)..(5): Xaa is histidine, tyrosine, serine, methionine, or an amino acid residue which is covalently linked to another amino acid residue of the sequence
  MISC_FEATURE (6)..(6): Xaa is histidine, tyrosine, serine, methionine, or an amino acid residue which is covalently linked to another amino acid residue of the sequence
  MISC_FEATURE (7)..(7): Xaa is glutamine, asparagine, methionine, serine, or an amino acid which is covalently linked to another amino acid residue of the sequence
  MISC_FEATURE (8)..(8): Xaa is lysine, arginine, or an amino acid residue which is covalently linked to another amino acid residue of the sequence
  MISC_FEATURE (9)..(9): Xaa is leucine, isoleucine, valine, phenylalanine, methionine, or an amino acid residue which is covalently linked to another amino acid residue of the sequence
  MISC_FEATURE (10)..(10): Xaa is valine, leucine, isoleucine, alanine, methionine, or an amino acid residue which is covalently linked to another amino acid residue of the sequence
  MISC_FEATURE (11)..(11): Xaa is phenylalanine, tyrosine, valine, leucine, isoleucine, methionine, or an amino acid residue which is covalently linked to another amino acid residue of the sequence
  MISC_FEATURE (12)..(12): Xaa is phenylalanine, tyrosine, valine, leucine, isoleucine, methionine, or an amino acid residue which is covalently linked to another amino acid residue of the sequence
  MISC_FEATURE (16)..(16): Xaa is valine, leucine, isoleucine, alanine, methionine, or an amino acid residue which is covalently linked to another amino acid residue of the sequence
  MISC_FEATURE (17)..(17): Xaa is glycine, alanine, serine, or an amino acid residue which is covalently linked to another amino acid residue of the sequence
  MISC_FEATURE (18)..(18): Xaa is serine, glycine, alanine, threonine, or an amino acid residue which is covalently linked to another amino acid residue of the sequence
  MISC_FEATURE (19)..(19): Xaa is asparagine, glutamine, methionine, or an amino acid residue which is covalently linked to another amino acid residue of the sequence
  MISC_FEATURE (20)..(20): Xaa is lysine, arginine, or an amino acid residue which is covalently linked to another amino acid residue of the sequence
  MISC_FEATURE (21)..(21): Xaa is glycine, alanine, serine, or an amino acid residue which is covalently linked to another amino acid residue of the sequence
  MISC_FEATURE (22)..(22): Xaa is alanine, valine, glycine, serine, or an amino acid residue which is covalently linked to another amino acid residue of the sequence
  MISC_FEATURE (23)..(23): Xaa is isoleucine, leucine, valine, phenylalanine, methionine, or an amino acid residue which is covalently linked to another amino acid residue of the sequence
  MISC_FEATURE (24)..(24): Xaa is isoleucine, leucine, valine, phenylalanine, methionine, or an amino acid residue which is covalently linked to another amino acid residue of the sequence
  MISC_FEATURE (25)..(25): Xaa is glycine, alanine, serine, or an amino acid residue which is covalently linked to another amino acid residue of the sequence
  MISC_FEATURE (26)..(26): Xaa is leucine, isoleucine, valine, phenylalanine, methionine, or an amino acid residue which is covalently linked to another amino acid residue of the sequence
  MISC_FEATURE (27)..(27): Xaa is methionine, valine, leucine, isoleucine, alanine, or an amino acid residue which is covalently linked to another amino acid residue of the sequence
  MISC_FEATURE (28)..(28): Xaa is valine, leucine, isoleucine, alanine, methionine, or an amino acid residue which is covalently linked to another amino acid residue of the sequence
  MISC_FEATURE (29)..(29): Xaa is glycine, alanine, serine, or an amino acid residue which is covalently linked to another amino acid residue of the sequence
  MISC_FEATURE (30)..(30): Xaa is glycine, alanine, serine, or an amino acid residue which is covalently linked to another amino acid residue of the sequence
GYEVXXXXXXXXAEDXXXXXXXXXXXXXXX

SEQ ID NO: 809 - protein, 29 aa, Artificial Sequence
  synthetic
  MISC_FEATURE (4)..(4): Xaa is histidine, tyrosine, serine, methionine, or an amino acid residue which is covalently linked to another amino acid residue of the sequence
  MISC_FEATURE (5)..(5): Xaa is histidine, tyrosine, serine, methionine, or an amino acid residue which is covalently linked to another amino acid residue of the sequence
  MISC_FEATURE (6)..(6): Xaa is glutamine, asparagine, methionine, serine, or an amino acid which is covalently linked to another amino acid residue of the sequence
  MISC_FEATURE (7)..(7): Xaa is lysine, arginine, or an amino acid residue which is covalently linked to another amino acid residue of the sequence
  MISC_FEATURE (8)..(8): Xaa is leucine, isoleucine, valine, phenylalanine, methionine, or an amino acid residue which is covalently linked to another amino acid residue of the sequence
  MISC_FEATURE (9)..(9): Xaa is valine, leucine, isoleucine, alanine, methionine, or an amino acid residue which is covalently linked to another amino acid residue of the sequence
  MISC_FEATURE (10)..(10): Xaa is phenylalanine, tyrosine, valine, leucine, isoleucine, methionine, or an amino acid residue which is covalently linked to another amino acid residue of the sequence
  MISC_FEATURE (11)..(11): Xaa is phenylalanine, tyrosine, valine, leucine, isoleucine, methionine, or an amino acid residue which is covalently linked to another amino acid residue of the sequence
  MISC_FEATURE (15)..(15): Xaa is valine, leucine, isoleucine, alanine, methionine, or an amino acid residue which is covalently linked to another amino acid residue of the sequence
  MISC_FEATURE (16)..(16): Xaa is glycine, alanine, serine, or an amino acid residue which is covalently linked to another amino acid residue of the sequence
  MISC_FEATURE (17)..(17): Xaa is serine, glycine, alanine, threonine, or an amino acid residue which is covalently linked to another amino acid residue of the sequence
  MISC_FEATURE (18)..(18): Xaa is asparagine, glutamine, methionine, or an amino acid residue which is covalently linked to another amino acid residue of the sequence
  MISC_FEATURE (19)..(19): Xaa is lysine, arginine, or an amino acid residue which is covalently linked to another amino acid residue of the sequence
  MISC_FEATURE (20)..(20): Xaa is glycine, alanine, serine, or an amino acid residue which is covalently linked to another amino acid residue of the sequence
  MISC_FEATURE (21)..(21): Xaa is alanine, valine, glycine, serine, or an amino acid residue which is covalently linked to another amino acid residue of the sequence
  MISC_FEATURE (22)..(22): Xaa is isoleucine, leucine, valine, phenylalanine, methionine, or an amino acid residue which is covalently linked to another amino acid residue of the sequence
  MISC_FEATURE (23)..(23): Xaa is isoleucine, leucine, valine, phenylalanine, methionine, or an amino acid residue which is covalently linked to another amino acid residue of the sequence
  MISC_FEATURE (24)..(24): Xaa is glycine, alanine, serine, or an amino acid residue which is covalently linked to another amino acid residue of the sequence
  MISC_FEATURE (25)..(25): Xaa is leucine, isoleucine, valine, phenylalanine, methionine, or an amino acid residue which is covalently linked to another amino acid residue of the sequence
  MISC_FEATURE (26)..(26): Xaa is methionine, valine, leucine, isoleucine, alanine, or an amino acid residue which is covalently linked to another amino acid residue of the sequence
  MISC_FEATURE (27)..(27): Xaa is valine, leucine, isoleucine, alanine, methionine, or an amino acid residue which is covalently linked to another amino acid residue of the sequence
  MISC_FEATURE (28)..(28): Xaa is glycine, alanine, serine, or an amino acid residue which is covalently linked to another amino acid residue of the sequence
  MISC_FEATURE (29)..(29): Xaa is glycine, alanine, serine, or an amino acid residue which is covalently linked to another amino acid residue of the sequence
YEVXXXXXXXXAEDXXXXXXXXXXXXXXX

SEQ ID NO: 810 - protein, 28 aa, Artificial Sequence
  synthetic
  MISC_FEATURE (3)..(3): Xaa is histidine, tyrosine, serine, methionine, or an amino acid residue which is covalently linked to another amino acid residue of the sequence
  MISC_FEATURE (4)..(4): Xaa is histidine, tyrosine, serine, methionine, or an amino acid residue which is covalently linked to another amino acid residue of the sequence
  MISC_FEATURE (5)..(5): Xaa is glutamine, asparagine, methionine, serine, or an amino acid which is covalently linked to another amino acid residue of the sequence
  MISC_FEATURE (6)..(6): Xaa is lysine, arginine, or an amino acid residue which is covalently linked to another amino acid residue of the sequence
  MISC_FEATURE (7)..(7): Xaa is leucine, isoleucine, valine, phenylalanine, methionine, or an amino acid residue which is covalently linked to another amino acid residue of the sequence
  MISC_FEATURE (8)..(8): Xaa is valine, leucine, isoleucine, alanine, methionine, or an amino acid residue which is covalently linked to another amino acid residue of the sequence
  MISC_FEATURE (9)..(9): Xaa is phenylalanine, tyrosine, valine, leucine, isoleucine, methionine, or an amino acid residue which is covalently linked to another amino acid residue of the sequence
  MISC_FEATURE (10)..(10): Xaa is phenylalanine, tyrosine, valine, leucine, isoleucine, methionine, or an amino acid residue which is covalently linked to another amino acid residue of the sequence
  MISC_FEATURE (14)..(14): Xaa is valine, leucine, isoleucine, alanine, methionine, or an amino acid residue which is covalently linked to another amino acid residue of the sequence
  MISC_FEATURE (15)..(15): Xaa is glycine, alanine, serine, or an amino acid residue which is covalently linked to another amino acid residue of the sequence
  MISC_FEATURE (16)..(16): Xaa is serine, glycine, alanine, threonine, or an amino acid residue which is covalently linked to another amino acid residue of the sequence
  MISC_FEATURE (17)..(17): Xaa is asparagine, glutamine, methionine, or an amino acid residue which is covalently linked to another amino acid residue of the sequence
  MISC_FEATURE (18)..(18): Xaa is lysine, arginine, or an amino acid residue which is covalently linked to another amino acid residue of the sequence
  MISC_FEATURE (19)..(19): Xaa is glycine, alanine, serine, or an amino acid residue which is covalently linked to another amino acid residue of the sequence
  MISC_FEATURE (20)..(20): Xaa is alanine, valine, glycine, serine, or an amino acid residue which is covalently linked to another amino acid residue of the sequence
  MISC_FEATURE (21)..(21): Xaa is isoleucine, leucine, valine, phenylalanine, methionine, or an amino acid residue which is covalently linked to another amino acid residue of the sequence
  MISC_FEATURE (22)..(22): Xaa is isoleucine, leucine, valine, phenylalanine, methionine, or an amino acid residue which is covalently linked to another amino acid residue of the sequence
  MISC_FEATURE (23)..(23): Xaa is glycine, alanine, serine, or an amino acid residue which is covalently linked to another amino acid residue of the sequence
  MISC_FEATURE (24)..(24): Xaa is leucine, isoleucine, valine, phenylalanine, methionine, or an amino acid residue which is covalently linked to another amino acid residue of the sequence
  MISC_FEATURE (25)..(25): Xaa is methionine, valine, leucine, isoleucine, alanine, or an amino acid residue which is covalently linked to another amino acid residue of the sequence
  MISC_FEATURE (26)..(26): Xaa is valine, leucine, isoleucine, alanine, methionine, or an amino acid residue which is covalently linked to another amino acid residue of the sequence
  MISC_FEATURE (27)..(27): Xaa is glycine, alanine, serine, or an amino acid residue which is covalently linked to another amino acid residue of the sequence
  MISC_FEATURE (28)..(28): Xaa is glycine, alanine, serine, or an amino acid residue which is covalently linked to another amino acid residue of the sequence
EVXXXXXXXXAEDXXXXXXXXXXXXXXX

SEQ ID NO: 811 - protein, 27 aa, Artificial Sequence
  synthetic
  MISC_FEATURE (2)..(2): Xaa is histidine, tyrosine, serine, methionine, or an amino acid residue which is covalently linked to another amino acid residue of the sequence
  MISC_FEATURE (3)..(3): Xaa is histidine, tyrosine, serine, methionine, or an amino acid residue which is covalently linked to another amino acid residue of the sequence
  MISC_FEATURE (4)..(4): Xaa is glutamine, asparagine, methionine, serine, or an amino acid which is covalently linked to another amino acid residue of the sequence
  MISC_FEATURE (5)..(5): Xaa is lysine, arginine, or an amino acid residue which is covalently linked to another amino acid residue of the sequence
  MISC_FEATURE (6)..(6): Xaa is leucine, isoleucine, valine, phenylalanine, methionine, or an amino acid residue which is covalently linked to another amino acid residue of the sequence
  MISC_FEATURE (7)..(7): Xaa is valine, leucine, isoleucine, alanine, methionine, or an amino acid residue which is covalently linked to another amino acid residue of the sequence
  MISC_FEATURE (8)..(8): Xaa is phenylalanine, tyrosine, valine, leucine, isoleucine, methionine, or an amino acid residue which is covalently linked to another amino acid residue of the sequence
  MISC_FEATURE (9)..(9): Xaa is phenylalanine, tyrosine, valine, leucine, isoleucine, methionine, or an amino acid residue which is covalently linked to another amino acid residue of the sequence
  MISC_FEATURE (13)..(13): Xaa is valine, leucine, isoleucine, alanine, methionine, or an amino acid residue which is covalently linked to another amino acid residue of the sequence
  MISC_FEATURE (14)..(14): Xaa is glycine, alanine, serine, or an amino acid residue which is covalently linked to another amino acid residue of the sequence
  MISC_FEATURE (15)..(15): Xaa is serine, glycine, alanine, threonine, or an amino acid residue which is covalently linked to another amino acid residue of the sequence
  MISC_FEATURE (16)..(16): Xaa is asparagine, glutamine, methionine, or an amino acid residue which is covalently linked to another amino acid residue of the sequence
  MISC_FEATURE (17)..(17): Xaa is lysine, arginine, or an amino acid residue which is covalently linked to another amino acid residue of the sequence
  MISC_FEATURE (18)..(18): Xaa is glycine, alanine, serine, or an amino acid residue which is covalently linked to another amino acid residue of the sequence
  MISC_FEATURE (19)..(19): Xaa is alanine, valine, glycine, serine, or an amino acid residue which is covalently linked to another amino acid residue of the sequence
  MISC_FEATURE (20)..(20): Xaa is isoleucine, leucine, valine, phenylalanine, methionine, or an amino acid residue which is covalently linked to another amino acid residue of the sequence
  MISC_FEATURE (21)..(21): Xaa is isoleucine, leucine, valine, phenylalanine, methionine, or an amino acid residue which is covalently linked to another amino acid residue of the sequence
  MISC_FEATURE (22)..(22): Xaa is glycine, alanine, serine, or an amino acid residue which is covalently linked to another amino acid residue of the sequence
  MISC_FEATURE (23)..(23): Xaa is leucine, isoleucine, valine, phenylalanine, methionine, or an amino acid residue which is covalently linked to another amino acid residue of the sequence
  MISC_FEATURE (24)..(24): Xaa is methionine, valine, leucine, isoleucine, alanine, or an amino acid residue which is covalently linked to another amino acid residue of the sequence
  MISC_FEATURE (25)..(25): Xaa is valine, leucine, isoleucine, alanine, methionine, or an amino acid residue which is covalently linked to another amino acid residue of the sequence
  MISC_FEATURE (26)..(26): Xaa is glycine, alanine, serine, or an amino acid residue which is covalently linked to another amino acid residue of the sequence
  MISC_FEATURE (27)..(27): Xaa is glycine, alanine, serine, or an amino acid residue which is covalently linked to another amino acid residue of the sequence
VXXXXXXXXAEDXXXXXXXXXXXXXXX

SEQ ID NO: 812 - skipped

SEQ ID NO: 813 - protein, 26 aa, Artificial Sequence
  synthetic
  MISC_FEATURE (1)..(1): Xaa is histidine, tyrosine, serine, methionine, or an amino acid residue which is covalently linked to another amino acid residue of the sequence
  MISC_FEATURE (2)..(2): Xaa is histidine, tyrosine, serine, methionine, or an amino acid residue which is covalently linked to another amino acid residue of the sequence
  MISC_FEATURE (3)..(3): Xaa is glutamine, asparagine, methionine, serine, or an amino acid which is covalently linked to another amino acid residue of the sequence
  MISC_FEATURE (4)..(4): Xaa is lysine, arginine, or an amino acid residue which is covalently linked to another amino acid residue of the sequence
  MISC_FEATURE (5)..(5): Xaa is leucine, isoleucine, valine, phenylalanine, methionine, or an amino acid residue which is covalently linked to another amino acid residue of the sequence
  MISC_FEATURE (6)..(6): Xaa is valine, leucine, isoleucine, alanine, methionine, or an amino acid residue which is covalently linked to another amino acid residue of the sequence
  MISC_FEATURE (7)..(7): Xaa is phenylalanine, tyrosine, valine, leucine, isoleucine, methionine, or an amino acid residue which is covalently linked to another amino acid residue of the sequence
  MISC_FEATURE (8)..(8): Xaa is phenylalanine, tyrosine, valine, leucine, isoleucine, methionine, or an amino acid residue which is covalently linked to another amino acid residue of the sequence
  MISC_FEATURE (12)..(12): Xaa is valine, leucine, isoleucine, alanine, methionine, or an amino acid residue which is covalently linked to another amino acid residue of the sequence
  MISC_FEATURE (13)..(13): Xaa is glycine, alanine, serine, or an amino acid residue which is covalently linked to another amino acid residue of the sequence
  MISC_FEATURE (14)..(14): Xaa is serine, glycine, alanine, threonine, or an amino acid residue which is covalently linked to another amino acid residue of the sequence
  MISC_FEATURE (15)..(15): Xaa is asparagine, glutamine, methionine, or an amino acid residue which is covalently linked to another amino acid residue of the sequence
  MISC_FEATURE (16)..(16): Xaa is lysine, arginine, or an amino acid residue which is covalently linked to another amino acid residue of the sequence
  MISC_FEATURE (17)..(17): Xaa is glycine, alanine, serine, or an amino acid residue which is covalently linked to another amino acid residue of the sequence
  MISC_FEATURE (18)..(18): Xaa is alanine, valine, glycine, serine, or an amino acid residue which is covalently linked to another amino acid residue of the sequence
  MISC_FEATURE (19)..(19): Xaa is isoleucine, leucine, valine, phenylalanine, methionine, or an amino acid residue which is covalently linked to another amino acid residue of the sequence
  MISC_FEATURE (20)..(20): Xaa is isoleucine, leucine, valine, phenylalanine, methionine, or an amino acid residue which is covalently linked to another amino acid residue of the sequence
  MISC_FEATURE (21)..(21): Xaa is glycine, alanine, serine, or an amino acid residue which is covalently linked to another amino acid residue of the sequence
  MISC_FEATURE (22)..(22): Xaa is leucine, isoleucine, valine, phenylalanine, methionine, or an amino acid residue which is covalently linked to another amino acid residue of the sequence
  MISC_FEATURE (23)..(23): Xaa is methionine, valine, leucine, isoleucine, alanine, or an amino acid residue which is covalently linked to another amino acid residue of the sequence
  MISC_FEATURE (24)..(24): Xaa is valine, leucine, isoleucine, alanine, methionine, or an amino acid residue which is covalently linked to another amino acid residue of the sequence
  MISC_FEATURE (25)..(25): Xaa is glycine, alanine, serine, or an amino acid residue which is covalently linked to another amino acid residue of the sequence
  MISC_FEATURE (26)..(26): Xaa is glycine, alanine, serine, or an amino acid residue which is covalently linked to another amino acid residue of the sequence
XXXXXXXXAEDXXXXXXXXXXXXXXX

SEQ ID NO: 814 - protein, 25 aa, Artificial Sequence
  synthetic
  MISC_FEATURE (1)..(1): Xaa is histidine, tyrosine, serine, methionine, or an amino acid residue which is covalently linked to another amino acid residue of the sequence
  MISC_FEATURE (2)..(2): Xaa is glutamine, asparagine, methionine, serine, or an amino acid which is covalently linked to another amino acid residue of the sequence
  MISC_FEATURE (3)..(3): Xaa is lysine, arginine, or an amino acid residue which is covalently linked to another amino acid residue of the sequence
  MISC_FEATURE (4)..(4): Xaa is leucine, isoleucine, valine, phenylalanine, methionine, or an amino acid residue which is covalently linked to another amino acid residue of the sequence
  MISC_FEATURE (5)..(5): Xaa is valine, leucine, isoleucine, alanine, methionine, or an amino acid residue which is covalently linked to another amino acid residue of the sequence
  MISC_FEATURE (6)..(6): Xaa is phenylalanine, tyrosine, valine, leucine, isoleucine, methionine, or an amino acid residue which is covalently linked to another amino acid residue of the sequence
  MISC_FEATURE (7)..(7): Xaa is phenylalanine, tyrosine, valine, leucine, isoleucine, methionine, or an amino acid residue which is covalently linked to another amino acid residue of the sequence
  MISC_FEATURE (11)..(11): Xaa is valine, leucine, isoleucine, alanine, methionine, or an amino acid residue which is covalently linked to another amino acid residue of the sequence
  MISC_FEATURE (12)..(12): Xaa is glycine, alanine, serine, or an amino acid residue which is covalently linked to another amino acid residue of the sequence
  MISC_FEATURE (13)..(13): Xaa is serine, glycine, alanine, threonine, or an amino acid residue which is covalently linked to another amino acid residue of the sequence
  MISC_FEATURE (14)..(14): Xaa is asparagine, glutamine, methionine, or an amino acid residue which is covalently linked to another amino acid residue of the sequence
  MISC_FEATURE (15)..(15): Xaa is lysine, arginine, or an amino acid residue which is covalently linked to another amino acid residue of the sequence
  MISC_FEATURE (16)..(16): Xaa is glycine, alanine, serine, or an amino acid residue which is covalently linked to another amino acid residue of the sequence
  MISC_FEATURE (17)..(17): Xaa is alanine, valine, glycine, serine, or an amino acid residue which is covalently linked to another amino acid residue of the sequence
  MISC_FEATURE (18)..(18): Xaa is isoleucine, leucine, valine, phenylalanine, methionine, or an amino acid residue which is covalently linked to another amino acid residue of the sequence
  MISC_FEATURE (19)..(19): Xaa is isoleucine, leucine, valine, phenylalanine, methionine, or an amino acid residue which is covalently linked to another amino acid residue of the sequence
  MISC_FEATURE (20)..(20): Xaa is glycine, alanine, serine, or an amino acid residue which is covalently linked to another amino acid residue of the sequence
  MISC_FEATURE (21)..(21): Xaa is leucine, isoleucine, valine, phenylalanine, methionine, or an amino acid residue which is covalently linked to another amino acid residue of the sequence
  MISC_FEATURE (22)..(22): Xaa is methionine, valine, leucine, isoleucine, alanine, or an amino acid residue which is covalently linked to another amino acid residue of the sequence
  MISC_FEATURE (23)..(23): Xaa is valine, leucine, isoleucine, alanine, methionine, or an amino acid residue which is covalently linked to another amino acid residue of the sequence
  MISC_FEATURE (24)..(24): Xaa is glycine, alanine, serine, or an amino acid residue which is covalently linked to another amino acid residue of the sequence
XXXXXXXAEDXXXXXXXXXXXXXXG

SEQ ID NO: 815 - protein, 24 aa, Artificial Sequence
  synthetic
  MISC_FEATURE (1)..(1): Xaa is glutamine, asparagine, methionine, serine, or an amino acid which is covalently linked to another amino acid residue of the sequence
  MISC_FEATURE (2)..(2): Xaa is lysine, arginine, or an amino acid residue which is covalently linked to another amino acid residue of the sequence
  MISC_FEATURE (3)..(3): Xaa is leucine, isoleucine, valine, phenylalanine, methionine, or an amino acid residue which is covalently linked to another amino acid residue of the sequence
  MISC_FEATURE (4)..(4): Xaa is valine, leucine, isoleucine, alanine, methionine, or an amino acid residue which is covalently linked to another amino acid residue of the sequence
  MISC_FEATURE (5)..(5): Xaa is phenylalanine, tyrosine, valine, leucine, isoleucine, methionine, or an amino acid residue which is covalently linked to another amino acid residue of the sequence
  MISC_FEATURE (6)..(6): Xaa is phenylalanine, tyrosine, valine, leucine, isoleucine, methionine, or an amino acid residue which is covalently linked to another amino acid residue of the sequence
  MISC_FEATURE (10)..(10): Xaa is valine, leucine, isoleucine, alanine, methionine, or an amino acid residue which is covalently linked to another amino acid residue of the sequence
  MISC_FEATURE (11)..(11): Xaa is glycine, alanine, serine, or an amino acid residue which is covalently linked to another amino acid residue of the sequence
  MISC_FEATURE (12)..(12): Xaa is serine, glycine, alanine, threonine, or an amino acid residue which is covalently linked to another amino acid residue of the sequence
  MISC_FEATURE (13)..(13): Xaa is asparagine, glutamine, methionine, or an amino acid residue which is covalently linked to another amino acid residue of the sequence
  MISC_FEATURE (14)..(14): Xaa is lysine, arginine, or an amino acid residue which is covalently linked to another amino acid residue of the sequence
  MISC_FEATURE (15)..(15): Xaa is glycine, alanine, serine, or an amino acid residue which is covalently linked to another amino acid residue of the sequence
  MISC_FEATURE (16)..(16): Xaa is alanine, valine, glycine, serine, or an amino acid residue which is covalently linked to another amino acid residue of the sequence
  MISC_FEATURE (17)..(17): Xaa is isoleucine, leucine, valine, phenylalanine, methionine, or an amino acid residue which is covalently linked to another amino acid residue of the sequence
  MISC_FEATURE (18)..(18): Xaa is isoleucine, leucine, valine, phenylalanine, methionine, or an amino acid residue which is covalently linked to another amino acid residue of the sequence
  MISC_FEATURE (19)..(19): Xaa is glycine, alanine, serine, or an amino acid residue which is covalently linked to another amino acid residue of the sequence
  MISC_FEATURE (20)..(20): Xaa is leucine, isoleucine, valine, phenylalanine, methionine, or an amino acid residue which is covalently linked to another amino acid residue of the sequence
  MISC_FEATURE (21)..(21): Xaa is methionine, valine, leucine, isoleucine, alanine, or an amino acid residue which is covalently linked to another amino acid residue of the sequence
  MISC_FEATURE (22)..(22): Xaa is valine, leucine, isoleucine, alanine, methionine, or an amino acid residue which is covalently linked to another amino acid residue of the sequence
XXXXXXAEDXXXXXXXXXXXXXGG

SEQ ID NO: 816 - protein, 23 aa, Artificial Sequence
  synthetic
  MISC_FEATURE (1)..(1): Xaa is lysine, arginine, or an amino acid residue which is covalently linked to another amino acid residue of the sequence
  MISC_FEATURE (2)..(2): Xaa is leucine, isoleucine, valine, phenylalanine, methionine, or an amino acid residue which is covalently linked to another amino acid residue of the sequence
  MISC_FEATURE (3)..(3): Xaa is valine, leucine, isoleucine, alanine, methionine, or an amino acid residue which is covalently linked to another amino acid residue of the sequence
  MISC_FEATURE (4)..(4): Xaa is phenylalanine, tyrosine, valine, leucine, isoleucine, methionine, or an amino acid residue which is covalently linked to another amino acid residue of the sequence
  MISC_FEATURE (5)..(5): Xaa is phenylalanine, tyrosine, valine, leucine, isoleucine, methionine, or an amino acid residue which is covalently linked to another amino acid residue of the sequence
  MISC_FEATURE (9)..(9): Xaa is valine, leucine, isoleucine, alanine, methionine, or an amino acid residue which is covalently linked to another amino acid residue of the sequence
  MISC_FEATURE (10)..(10): Xaa is glycine, alanine, serine, or an amino acid residue which is covalently linked to another amino acid residue of the sequence
  MISC_FEATURE (11)..(11): Xaa is serine, glycine, alanine, threonine, or an amino acid residue which is covalently linked to another amino acid residue of the sequence
  MISC_FEATURE (12)..(12): Xaa is asparagine, glutamine, methionine, or an amino acid residue which is covalently linked to another amino acid residue of the sequence
  MISC_FEATURE (13)..(13): Xaa is lysine, arginine, or an amino acid residue which is covalently linked to another amino acid residue of the sequence
  MISC_FEATURE (14)..(14): Xaa is glycine, alanine, serine, or an amino acid residue which is covalently linked to another amino acid residue of the sequence
  MISC_FEATURE (15)..(15): Xaa is alanine, valine, glycine, serine, or an amino acid residue which is covalently linked to another amino acid residue of the sequence
  MISC_FEATURE (16)..(16): Xaa is isoleucine, leucine, valine, phenylalanine, methionine, or an amino acid residue which is covalently linked to another amino acid residue of the sequence
  MISC_FEATURE (17)..(17): Xaa is isoleucine, leucine, valine, phenylalanine, methionine, or an amino acid residue which is covalently linked to another amino acid residue of the sequence
  MISC_FEATURE (18)..(18): Xaa is glycine, alanine, serine, or an amino acid residue which is covalently linked to another amino acid residue of the sequence
  MISC_FEATURE (19)..(19): Xaa is leucine, isoleucine, valine, phenylalanine, methionine, or an amino acid residue which is covalently linked to another amino acid residue of the sequence
  MISC_FEATURE (20)..(20): Xaa is methionine, valine, leucine, isoleucine, alanine, or an amino acid residue which is covalently linked to another amino acid residue of the sequence
XXXXXAEDXXXXXXXXXXXXVGG

SEQ ID NO: 817 - protein, 22 aa, Artificial Sequence
  synthetic
  MISC_FEATURE (1)..(1): Xaa is leucine, isoleucine, valine, phenylalanine, methionine, or an amino acid residue which is covalently linked to another amino acid residue of the sequence
  MISC_FEATURE (2)..(2): Xaa is valine, leucine, isoleucine, alanine, methionine, or an amino acid residue which is covalently linked to another amino acid residue of the sequence
  MISC_FEATURE (3)..(3): Xaa is phenylalanine, tyrosine, valine, leucine, isoleucine, methionine, or an amino acid residue which is covalently linked to another amino acid residue of the sequence
  MISC_FEATURE (4)..(4): Xaa is phenylalanine, tyrosine, valine, leucine, isoleucine, methionine, or an amino acid residue which is covalently linked to another amino acid residue of the sequence
  MISC_FEATURE (8)..(8): Xaa is valine, leucine, isoleucine, alanine, methionine, or an amino acid residue which is covalently linked to another amino acid residue of the sequence
  MISC_FEATURE (9)..(9): Xaa is glycine, alanine, serine, or an amino acid residue which is covalently linked to another amino acid residue of the sequence
  MISC_FEATURE (10)..(10): Xaa is serine, glycine, alanine, threonine, or an amino acid residue which is covalently linked to another amino acid residue of the sequence
  MISC_FEATURE (11)..(11): Xaa is asparagine, glutamine, methionine, or an amino acid residue which is covalently linked to another amino acid residue of the sequence
  MISC_FEATURE (12)..(12): Xaa is lysine, arginine, or an amino acid residue which is covalently linked to another amino acid residue of the sequence
  MISC_FEATURE (13)..(13): Xaa is glycine, alanine, serine, or an amino acid residue which is covalently linked to another amino acid residue of the sequence
  MISC_FEATURE (14)..(14): Xaa is alanine, valine, glycine, serine, or an amino acid residue which is covalently linked to another amino acid residue of the sequence
  MISC_FEATURE (15)..(15): Xaa is isoleucine, leucine, valine, phenylalanine, methionine, or an amino acid residue which is covalently linked to another amino acid residue of the sequence
  MISC_FEATURE (16)..(16): Xaa is isoleucine, leucine, valine, phenylalanine, methionine, or an amino acid residue which is covalently linked to another amino acid residue of the sequence
  MISC_FEATURE (17)..(17): Xaa is glycine, alanine, serine, or an amino acid residue which is covalently linked to another amino acid residue of the sequence
  MISC_FEATURE (18)..(18): Xaa is leucine, isoleucine, valine, phenylalanine, methionine, or an amino acid residue which is covalently linked to another amino acid residue of the sequence
XXXXAEDXXXXXXXXXXXMVGG

SEQ ID NO: 818 - protein, 21 aa, Artificial Sequence
  synthetic
  MISC_FEATURE (1)..(1): Xaa is valine, leucine, isoleucine, alanine, methionine, or an amino acid residue which is covalently linked to another amino acid residue of the sequence
  MISC_FEATURE (2)..(2): Xaa is phenylalanine, tyrosine, valine, leucine, isoleucine, methionine, or an amino acid residue which is covalently linked to another amino acid residue of the sequence
  MISC_FEATURE (3)..(3): Xaa is phenylalanine, tyrosine, valine, leucine, isoleucine, methionine, or an amino acid residue which is covalently linked to another amino acid residue of the sequence
  MISC_FEATURE (7)..(7): Xaa is valine, leucine, isoleucine, alanine, methionine, or an amino acid residue which is covalently linked to another amino acid residue of the sequence
  MISC_FEATURE (8)..(8): Xaa is glycine, alanine, serine, or an amino acid residue which is covalently linked to another amino acid residue of the sequence
  MISC_FEATURE (9)..(9): Xaa is serine, glycine, alanine, threonine, or an amino acid residue which is covalently linked to another amino acid residue of the sequence
  MISC_FEATURE (10)..(10): Xaa is asparagine, glutamine, methionine, or an amino acid residue which is covalently linked to another amino acid residue of the sequence
  MISC_FEATURE (11)..(11): Xaa is lysine, arginine, or an amino acid residue which is covalently linked to another amino acid residue of the sequence
  MISC_FEATURE (12)..(12): Xaa is glycine, alanine, serine, or an amino acid residue which is covalently linked to another amino acid residue of the sequence
  MISC_FEATURE (13)..(13): Xaa is alanine, valine, glycine, serine, or an amino acid residue which is covalently linked to another amino acid residue of the sequence
  MISC_FEATURE (14)..(14): Xaa is isoleucine, leucine, valine, phenylalanine, methionine, or an amino acid residue which is covalently linked to another amino acid residue of the sequence
  MISC_FEATURE (15)..(15): Xaa is isoleucine, leucine, valine, phenylalanine, methionine, or an amino acid residue which is covalently linked to another amino acid residue of the sequence
  MISC_FEATURE (16)..(16): Xaa is glycine, alanine, serine, or an amino acid residue which is covalently linked to another amino acid residue of the sequence
XXXAEDXXXXXXXXXXLMVGG

SEQ ID NO: 819 - protein, 20 aa, Artificial Sequence
  synthetic
  MISC_FEATURE (1)..(1): Xaa is phenylalanine, tyrosine, valine, leucine, isoleucine, methionine, or an amino acid residue which is covalently linked to another amino acid residue of the sequence
  MISC_FEATURE (2)..(2): Xaa is phenylalanine, tyrosine, valine, leucine, isoleucine, methionine, or an amino acid residue which is covalently linked to another amino acid residue of the sequence
  MISC_FEATURE (6)..(6): Xaa is valine, leucine, isoleucine, alanine, methionine, or an amino acid residue which is covalently linked to another amino acid residue of the sequence
  MISC_FEATURE (7)..(7): Xaa is glycine, alanine, serine, or an amino acid residue which is covalently linked to another amino acid residue of the sequence
  MISC_FEATURE (8)..(8): Xaa is serine, glycine, alanine, threonine, or an amino acid residue which is covalently linked to another amino acid residue of the sequence
  MISC_FEATURE (9)..(9): Xaa is asparagine, glutamine, methionine, or an amino acid residue which is covalently linked to another amino acid residue of the sequence
  MISC_FEATURE (10)..(10): Xaa is lysine, arginine, or an amino acid residue which is covalently linked to another amino acid residue of the sequence
  MISC_FEATURE (11)..(11): Xaa is glycine, alanine, serine, or an amino acid residue which is covalently linked to another amino acid residue of the sequence
  MISC_FEATURE (12)..(12): Xaa is alanine, valine, glycine, serine, or an amino acid residue which is covalently linked to another amino acid residue of the sequence
  MISC_FEATURE (13)..(13): Xaa is isoleucine, leucine, valine, phenylalanine, methionine, or an amino acid residue which is covalently linked to another amino acid residue of the sequence
  MISC_FEATURE (14)..(14): Xaa is isoleucine, leucine, valine, phenylalanine, methionine, or an amino acid residue which is covalently linked to another amino acid residue of the sequence
XXAEDXXXXXXXXXGLMVGG

SEQ ID NO: 820 - protein, 19 aa, Artificial Sequence
  synthetic
  MISC_FEATURE (1)..(1): Xaa is phenylalanine, tyrosine, valine, leucine, isoleucine, methionine, or an amino acid residue which is covalently linked to another amino acid residue of the sequence
  MISC_FEATURE (5)..(5): Xaa is valine, leucine, isoleucine, alanine, methionine, or an amino acid residue which is covalently linked to another amino acid residue of the sequence
  MISC_FEATURE (6)..(6): Xaa is glycine, alanine, serine, or an amino acid residue which is covalently linked to another amino acid residue of the sequence
  MISC_FEATURE (7)..(7): Xaa is serine, glycine, alanine, threonine, or an amino acid residue which is covalently linked to another amino acid residue of the sequence
  MISC_FEATURE (8)..(8): Xaa is asparagine, glutamine, methionine, or an amino acid residue which is covalently linked to another amino acid residue of the sequence
  MISC_FEATURE (9)..(9): Xaa is lysine, arginine, or an amino acid residue which is covalently linked to another amino acid residue of the sequence
  MISC_FEATURE (10)..(10): Xaa is glycine, alanine, serine, or an amino acid residue which is covalently linked to another amino acid residue of the sequence
  MISC_FEATURE (11)..(11): Xaa is alanine, valine, glycine, serine, or an amino acid residue which is covalently linked to another amino acid residue of the sequence
  MISC_FEATURE (12)..(12): Xaa is isoleucine, leucine, valine, phenylalanine, methionine, or an amino acid residue which is covalently linked to another amino acid residue of the sequence
XAEDXXXXXXXXIGLMVGG

SEQ ID NO: 821 - protein, 37 aa, Artificial Sequence
  synthetic
  MISC_FEATURE (14)..(14): Xaa is histidine, tyrosine, serine, methionine, or an amino acid residue which is covalently linked to another amino acid residue of the sequence
  MISC_FEATURE (15)..(15): Xaa is glutamine, asparagine, methionine, serine, or an amino acid which is covalently linked to another amino acid residue of the sequence
  MISC_FEATURE (16)..(16): Xaa is lysine, arginine, or an amino acid residue which is covalently linked to another amino acid residue of the sequence
  MISC_FEATURE (17)..(17): Xaa is leucine, isoleucine, valine, phenylalanine, methionine, or an amino acid residue which is covalently linked to another amino acid residue of the sequence
  MISC_FEATURE (18)..(18): Xaa is valine, leucine, isoleucine, alanine, methionine, or an amino acid residue which is covalently linked to another amino acid residue of the sequence
  MISC_FEATURE (19)..(19): Xaa is phenylalanine, tyrosine, valine, leucine, isoleucine, methionine, or an amino acid residue which is covalently linked to another amino acid residue of the sequence
  MISC_FEATURE (20)..(20): Xaa is phenylalanine, tyrosine, valine, leucine, isoleucine, methionine, or an amino acid residue which is covalently linked to another amino acid residue of the sequence
  MISC_FEATURE (24)..(24): Xaa is valine, leucine, isoleucine, alanine, methionine, or an amino acid residue which is covalently linked to another amino acid residue of the sequence
  MISC_FEATURE (25)..(25): Xaa is glycine, alanine, serine, or an amino acid residue which is covalently linked to another amino acid residue of the sequence
  MISC_FEATURE (26)..(26): Xaa is serine, glycine, alanine, threonine, or an amino acid residue which is covalently linked to another amino acid residue of the sequence
  MISC_FEATURE (27)..(27): Xaa is asparagine, glutamine, methionine, or an amino acid residue which is covalently linked to another amino acid residue of the sequence
  MISC_FEATURE (28)..(28): Xaa is lysine, arginine, or an amino acid residue which is covalently linked to another amino acid residue of the sequence
  MISC_FEATURE (29)..(29): Xaa is glycine, alanine, serine, or an amino acid residue which is covalently linked to another amino acid residue of the sequence
  MISC_FEATURE (30)..(30): Xaa is alanine, valine, glycine, serine, or an amino acid residue which is covalently linked to another amino acid residue of the sequence
  MISC_FEATURE (31)..(31): Xaa is isoleucine, leucine, valine, phenylalanine, methionine, or an amino acid residue which is covalently linked to another amino acid residue of the sequence
  MISC_FEATURE (32)..(32): Xaa is isoleucine, leucine, valine, phenylalanine, methionine, or an amino acid residue which is covalently linked to another amino acid residue of the sequence
  MISC_FEATURE (33)..(33): Xaa is glycine, alanine, serine, or an amino acid residue which is covalently linked to another amino acid residue of the sequence
  MISC_FEATURE (34)..(34): Xaa is leucine, isoleucine, valine, phenylalanine, methionine, or an amino acid residue which is covalently linked to another amino acid residue of the sequence
  MISC_FEATURE (35)..(35): Xaa is methionine, valine, leucine, isoleucine, alanine, or an amino acid residue which is covalently linked to another amino acid residue of the sequence
  MISC_FEATURE (36)..(36): Xaa is valine, leucine, isoleucine, alanine, methionine, or an amino acid residue which is covalently linked to another amino acid residue of the sequence
  MISC_FEATURE (37)..(37): Xaa is glycine, alanine, serine, or an amino acid residue which is covalently linked to another amino acid residue of the sequence
DAEFRHDSGYEVHXXXXXXXAEDXXXXXXXXXXXXXX

SEQ ID NO: 822 - protein, 36 aa, Artificial Sequence
  synthetic
  MISC_FEATURE (13)..(13): Xaa is histidine, tyrosine, serine, methionine, or an amino acid residue which is covalently linked to another amino acid residue of the sequence
  MISC_FEATURE (14)..(14): Xaa is glutamine, asparagine, methionine, serine, or an amino acid which is covalently linked to another amino acid residue of the sequence
  MISC_FEATURE (15)..(15): Xaa is lysine, arginine, or an amino acid residue which is covalently linked to another amino acid residue of the sequence
  MISC_FEATURE (16)..(16): Xaa is leucine, isoleucine, valine, phenylalanine, methionine, or an amino acid residue which is covalently linked to another amino acid residue of the sequence
  MISC_FEATURE (17)..(17): Xaa is valine, leucine, isoleucine, alanine, methionine, or an amino acid residue which is covalently linked to another amino acid residue of the sequence
  MISC_FEATURE (18)..(18): Xaa is phenylalanine, tyrosine, valine, leucine, isoleucine, methionine, or an amino acid residue which is covalently linked to another amino acid residue of the sequence
  MISC_FEATURE (19)..(19): Xaa is phenylalanine, tyrosine, valine, leucine, isoleucine, methionine, or an amino acid residue which is covalently linked to another amino acid residue of the sequence
  MISC_FEATURE (23)..(23): Xaa is valine, leucine, isoleucine, alanine, methionine, or an amino acid residue which is covalently linked to another amino acid residue of the sequence
  MISC_FEATURE (24)..(24): Xaa is glycine, alanine, serine, or an amino acid residue which is covalently linked to another amino acid residue of the sequence
  MISC_FEATURE (25)..(25): Xaa is serine, glycine, alanine, threonine, or an amino acid residue which is covalently linked to another amino acid residue of the sequence
  MISC_FEATURE (26)..(26): Xaa is asparagine, glutamine, methionine, or an amino acid residue which is covalently linked to another amino acid residue of the sequence
  MISC_FEATURE (27)..(27): Xaa is lysine, arginine, or an amino acid residue which is covalently linked to another amino acid residue of the sequence
  MISC_FEATURE (28)..(28): Xaa is glycine, alanine, serine, or an amino acid residue which is covalently linked to another amino acid residue of the sequence
  MISC_FEATURE (29)..(29): Xaa is alanine, valine, glycine, serine, or an amino acid residue which is covalently linked to another amino acid residue of the sequence
  MISC_FEATURE (30)..(30): Xaa is isoleucine, leucine, valine, phenylalanine, methionine, or an amino acid residue which is covalently linked to another amino acid residue of the sequence
  MISC_FEATURE (31)..(31): Xaa is isoleucine, leucine, valine, phenylalanine, methionine, or an amino acid residue which is covalently linked to another amino acid residue of the sequence
  MISC_FEATURE (32)..(32): Xaa is glycine, alanine, serine, or an amino acid residue which is covalently linked to another amino acid residue of the sequence
  MISC_FEATURE (33)..(33): Xaa is leucine, isoleucine, valine, phenylalanine, methionine, or an amino acid residue which is covalently linked to another amino acid residue of the sequence
  MISC_FEATURE (34)..(34): Xaa is methionine, valine, leucine, isoleucine, alanine, or an amino acid residue which is covalently linked to another amino acid residue of the sequence
  MISC_FEATURE (35)..(35): Xaa is valine, leucine, isoleucine, alanine, methionine, or an amino acid residue which is covalently linked to another amino acid residue of the sequence
  MISC_FEATURE (36)..(36): Xaa is glycine, alanine, serine, or an amino acid residue which is covalently linked to another amino acid residue of the sequence
AEFRHDSGYEVHXXXXXXXAEDXXXXXXXXXXXXXX

SEQ ID NO: 823 - protein, 35 aa, Artificial Sequence
  synthetic
  MISC_FEATURE (12)..(12): Xaa is histidine, tyrosine, serine, methionine, or an amino acid residue which is covalently linked to another amino acid residue of the sequence
  MISC_FEATURE (13)..(13): Xaa is glutamine, asparagine, methionine, serine, or an amino acid which is covalently linked to another amino acid residue of the sequence
  MISC_FEATURE (14)..(14): Xaa is lysine, arginine, or an amino acid residue which is covalently linked to another amino acid residue of the sequence
  MISC_FEATURE (15)..(15): Xaa is leucine, isoleucine, valine, phenylalanine, methionine, or an amino acid residue which is covalently linked to another amino acid residue of the sequence
  MISC_FEATURE (16)..(16): Xaa is valine, leucine, isoleucine, alanine, methionine, or an amino acid residue which is covalently linked to another amino acid residue of the sequence
  MISC_FEATURE (17)..(17): Xaa is phenylalanine, tyrosine, valine, leucine, isoleucine, methionine, or an amino acid residue which is covalently linked to another amino acid residue of the sequence
  MISC_FEATURE (18)..(18): Xaa is phenylalanine, tyrosine, valine, leucine, isoleucine, methionine, or an amino acid residue which is covalently linked to another amino acid residue of the sequence
  MISC_FEATURE (22)..(22): Xaa is valine, leucine, isoleucine, alanine, methionine, or an amino acid residue which is covalently linked to another amino acid residue of the sequence
  MISC_FEATURE (23)..(23): Xaa is glycine, alanine, serine, or an amino acid residue which is covalently linked to another amino acid residue of the sequence
  MISC_FEATURE (24)..(24): Xaa is serine, glycine, alanine, threonine, or an amino acid residue which is covalently linked to another amino acid residue of the sequence
  MISC_FEATURE (25)..(25): Xaa is asparagine, glutamine, methionine, or an amino acid residue which is covalently linked to another amino acid residue of the sequence
  MISC_FEATURE (26)..(26): Xaa is lysine, arginine, or an amino acid residue which is covalently linked to another amino acid residue of the sequence
  MISC_FEATURE (27)..(27): Xaa is glycine, alanine, serine, or an amino acid residue which is covalently linked to another amino acid residue of the sequence
  MISC_FEATURE (28)..(28): Xaa is alanine, valine, glycine, serine, or an amino acid residue which is covalently linked to another amino acid residue of the sequence
  MISC_FEATURE (29)..(29): Xaa is isoleucine, leucine, valine, phenylalanine, methionine, or an amino acid residue which is covalently linked to another amino acid residue of the sequence
  MISC_FEATURE (30)..(30): Xaa is isoleucine, leucine, valine, phenylalanine, methionine, or an amino acid residue which is covalently linked to another amino acid residue of the sequence
  MISC_FEATURE (31)..(31): Xaa is glycine, alanine, serine, or an amino acid residue which is covalently linked to another amino acid residue of the sequence
  MISC_FEATURE (32)..(32): Xaa is leucine, isoleucine, valine, phenylalanine, methionine, or an amino acid residue which is covalently linked to another amino acid residue of the sequence
  MISC_FEATURE (33)..(33): Xaa is methionine, valine, leucine, isoleucine, alanine, or an amino acid residue which is covalently linked to another amino acid residue of the sequence
  MISC_FEATURE (34)..(34): Xaa is valine, leucine, isoleucine, alanine, methionine, or an amino acid residue which is covalently linked to another amino acid residue of the sequence
  MISC_FEATURE (35)..(35): Xaa is glycine, alanine, serine, or an amino acid residue which is covalently linked to another amino acid residue of the sequence
EFRHDSGYEVHXXXXXXXAEDXXXXXXXXXXXXXX

SEQ ID NO: 824 - protein, 34 aa, Artificial Sequence
  synthetic
  MISC_FEATURE (11)..(11): Xaa is histidine, tyrosine, serine, methionine, or an amino acid residue which is covalently linked to another amino acid residue of the sequence
  MISC_FEATURE (12)..(12): Xaa is glutamine, asparagine, methionine, serine, or an amino acid which is covalently linked to another amino acid residue of the sequence
  MISC_FEATURE (13)..(13): Xaa is lysine, arginine, or an amino acid residue which is covalently linked to another amino acid residue of the sequence
  MISC_FEATURE (14)..(14): Xaa is leucine, isoleucine, valine, phenylalanine, methionine, or an amino acid residue which is covalently linked to another amino acid residue of the sequence
  MISC_FEATURE (15)..(15): Xaa is valine, leucine, isoleucine, alanine, methionine, or an amino acid residue which is covalently linked to another amino acid residue of the sequence
  MISC_FEATURE (16)..(16): Xaa is phenylalanine, tyrosine, valine, leucine, isoleucine, methionine, or an amino acid residue which is covalently linked to another amino acid residue of the sequence
  MISC_FEATURE (17)..(17): Xaa is phenylalanine, tyrosine, valine, leucine, isoleucine, methionine, or an amino acid residue which is covalently linked to another amino acid residue of the sequence
  MISC_FEATURE (21)..(21): Xaa is valine, leucine, isoleucine, alanine, methionine, or an amino acid residue which is covalently linked to another amino acid residue of the sequence
  MISC_FEATURE (22)..(22): Xaa is glycine, alanine, serine, or an amino acid residue which is covalently linked to another amino acid residue of the sequence
  MISC_FEATURE (23)..(23): Xaa is serine, glycine, alanine, threonine, or an amino acid residue which is covalently linked to another amino acid residue of the sequence
  MISC_FEATURE (24)..(24): Xaa is asparagine, glutamine, methionine, or an amino acid residue which is covalently linked to another amino acid residue of the sequence
  MISC_FEATURE (25)..(25): Xaa is lysine, arginine, or an amino acid residue which is covalently linked to another amino acid residue of the sequence
  MISC_FEATURE (26)..(26): Xaa is glycine, alanine, serine, or an amino acid residue which is covalently linked to another amino acid residue of the sequence
  MISC_FEATURE (27)..(27): Xaa is alanine, valine, glycine, serine, or an amino acid residue which is covalently linked to another amino acid residue of the sequence
  MISC_FEATURE (28)..(28): Xaa is isoleucine, leucine, valine, phenylalanine, methionine, or an amino acid residue which is covalently linked to another amino acid residue of the sequence
  MISC_FEATURE (29)..(29): Xaa is isoleucine, leucine, valine, phenylalanine, methionine, or an amino acid residue which is covalently linked to another amino acid residue of the sequence
  MISC_FEATURE (30)..(30): Xaa is glycine, alanine, serine, or an amino acid residue which is covalently linked to another amino acid residue of the sequence
  MISC_FEATURE (31)..(31): Xaa is leucine, isoleucine, valine, phenylalanine, methionine, or an amino acid residue which is covalently linked to another amino acid residue of the sequence
  MISC_FEATURE (32)..(32): Xaa is methionine, valine, leucine, isoleucine, alanine, or an amino acid residue which is covalently linked to another amino acid residue of the sequence
  MISC_FEATURE (33)..(33): Xaa is valine, leucine, isoleucine, alanine, methionine, or an amino acid residue which is covalently linked to another amino acid residue of the sequence
  MISC_FEATURE (34)..(34): Xaa is glycine, alanine, serine, or an amino acid residue which is covalently linked to another amino acid residue of the sequence
FRHDSGYEVHXXXXXXXAEDXXXXXXXXXXXXXX

SEQ ID NO: 825 - protein, 33 aa, Artificial Sequence
  synthetic
  MISC_FEATURE (10)..(10): Xaa is histidine, tyrosine, serine, methionine, or an amino acid residue which is covalently linked to another amino acid residue of the sequence
  MISC_FEATURE (11)..(11): Xaa is glutamine, asparagine, methionine, serine, or an amino acid which is covalently linked to another amino acid residue of the sequence
  MISC_FEATURE (12)..(12): Xaa is lysine, arginine, or an amino acid residue which is covalently linked to another amino acid residue of the sequence
  MISC_FEATURE (13)..(13): Xaa is leucine, isoleucine, valine, phenylalanine, methionine, or an amino acid residue which is covalently linked to another amino acid residue of the sequence
  MISC_FEATURE (14)..(14): Xaa is valine, leucine, isoleucine, alanine, methionine, or an amino acid residue which is covalently linked to another amino acid residue of the sequence
  MISC_FEATURE (15)..(15): Xaa is phenylalanine, tyrosine, valine, leucine, isoleucine, methionine, or an amino acid residue which is covalently linked to another amino acid residue of the sequence
  MISC_FEATURE (16)..(16): Xaa is phenylalanine, tyrosine, valine, leucine, isoleucine, methionine, or an amino acid residue which is covalently linked to another amino acid residue of the sequence
  MISC_FEATURE (20)..(20): Xaa is valine, leucine, isoleucine, alanine, methionine, or an amino acid residue which is covalently linked to another amino acid residue of the sequence
  MISC_FEATURE (21)..(21): Xaa is glycine, alanine, serine, or an amino acid residue which is covalently linked to another amino acid residue of the sequence
  MISC_FEATURE (22)..(22): Xaa is serine, glycine, alanine, threonine, or an amino acid residue which is covalently linked to another amino acid residue of the sequence
  MISC_FEATURE (23)..(23): Xaa is asparagine, glutamine, methionine, or an amino acid residue which is covalently linked to another amino acid residue of the sequence
  MISC_FEATURE (24)..(24): Xaa is lysine, arginine, or an amino acid residue which is covalently linked to another amino acid residue of the sequence
  MISC_FEATURE (25)..(25): Xaa is glycine, alanine, serine, or an amino acid residue which is covalently linked to another amino acid residue of the sequence
  MISC_FEATURE (26)..(26): Xaa is alanine, valine, glycine, serine, or an amino acid residue which is covalently linked to another amino acid residue of the sequence
  MISC_FEATURE (27)..(27): Xaa is isoleucine, leucine, valine, phenylalanine, methionine, or an amino acid residue which is covalently linked to another amino acid residue of the sequence
  MISC_FEATURE (28)..(28): Xaa is isoleucine, leucine, valine, phenylalanine, methionine, or an amino acid residue which is covalently linked to another amino acid residue of the sequence
  MISC_FEATURE (29)..(29): Xaa is glycine, alanine, serine, or an amino acid residue which is covalently linked to another amino acid residue of the sequence
  MISC_FEATURE (30)..(30): Xaa is leucine, isoleucine, valine, phenylalanine, methionine, or an amino acid residue which is covalently linked to another amino acid residue of the sequence
  MISC_FEATURE (31)..(31): Xaa is methionine, valine, leucine, isoleucine, alanine, or an amino acid residue which is covalently linked to another amino acid residue of the sequence
  MISC_FEATURE (32)..(32): Xaa is valine, leucine, isoleucine, alanine, methionine, or an amino acid residue which is covalently linked to another amino acid residue of the sequence
  MISC_FEATURE (33)..(33): Xaa is glycine, alanine, serine, or an amino acid residue which is covalently linked to another amino acid residue of the sequence
RHDSGYEVHXXXXXXXAEDXXXXXXXXXXXXXX

SEQ ID NO: 826 - protein, 32 aa, Artificial Sequence
  synthetic
  MISC_FEATURE (9)..(9): Xaa is histidine, tyrosine, serine, methionine, or an amino acid residue which is covalently linked to another amino acid residue of the sequence
  MISC_FEATURE (10)..(10): Xaa is glutamine, asparagine, methionine, serine, or an amino acid which is covalently linked to another amino acid residue of the sequence
  MISC_FEATURE (11)..(11): Xaa is lysine, arginine, or an amino acid residue which is covalently linked to another amino acid residue of the sequence
  MISC_FEATURE (12)..(12): Xaa is leucine, isoleucine, valine, phenylalanine, methionine, or an amino acid residue which is covalently linked to another amino acid residue of the sequence
  MISC_FEATURE (13)..(13): Xaa is valine, leucine, isoleucine, alanine, methionine, or an amino acid residue which is covalently linked to another amino acid residue of the sequence
  MISC_FEATURE (14)..(14): Xaa is phenylalanine, tyrosine, valine, leucine, isoleucine, methionine, or an amino acid residue which is covalently linked to another amino acid residue of the sequence
  MISC_FEATURE (15)..(15): Xaa is phenylalanine, tyrosine, valine, leucine, isoleucine, methionine, or an amino acid residue which is covalently linked to another amino acid residue of the sequence
  MISC_FEATURE (19)..(19): Xaa is valine, leucine, isoleucine, alanine, methionine, or an amino acid residue which is covalently linked to another amino acid residue of the sequence
  MISC_FEATURE (20)..(20): Xaa is glycine, alanine, serine, or an amino acid residue which is covalently linked to another amino acid residue of the sequence
  MISC_FEATURE (21)..(21): Xaa is serine, glycine, alanine, threonine, or an amino acid residue which is covalently linked to another amino acid residue of the sequence
  MISC_FEATURE (22)..(22): Xaa is asparagine, glutamine, methionine, or an amino acid residue which is covalently linked to another amino acid residue of the sequence
  MISC_FEATURE (23)..(23): Xaa is lysine, arginine, or an amino acid residue which is covalently linked to another amino acid residue of the sequence
  MISC_FEATURE (24)..(24): Xaa is glycine, alanine, serine, or an amino acid residue which is covalently linked to another amino acid residue of the sequence
  MISC_FEATURE (25)..(25): Xaa is alanine, valine, glycine, serine, or an amino acid residue which is covalently linked to another amino acid residue of the sequence
  MISC_FEATURE (26)..(26): Xaa is isoleucine, leucine, valine, phenylalanine, methionine, or an amino acid residue which is covalently linked to another amino acid residue of the sequence
  MISC_FEATURE (27)..(27): Xaa is isoleucine, leucine, valine, phenylalanine, methionine, or an amino acid residue which is covalently linked to another amino acid residue of the sequence
  MISC_FEATURE (28)..(28): Xaa is glycine, alanine, serine, or an amino acid residue which is covalently linked to another amino acid residue of the sequence
  MISC_FEATURE (29)..(29): Xaa is leucine, isoleucine, valine, phenylalanine, methionine, or an amino acid residue which is covalently linked to another amino acid residue of the sequence
  MISC_FEATURE (30)..(30): Xaa is methionine, valine, leucine, isoleucine, alanine, or an amino acid residue which is covalently linked to another amino acid residue of the sequence
  MISC_FEATURE (31)..(31): Xaa is valine, leucine, isoleucine, alanine, methionine, or an amino acid residue which is covalently linked to another amino acid residue of the sequence
  MISC_FEATURE (32)..(32): Xaa is glycine, alanine, serine, or an amino acid residue which is covalently linked to another amino acid residue of the sequence
HDSGYEVHXXXXXXXAEDXXXXXXXXXXXXXX

SEQ ID NO: 827 - protein, 31 aa, Artificial Sequence
  synthetic
  MISC_FEATURE (8)..(8): Xaa is histidine, tyrosine, serine, methionine, or an amino acid residue which is covalently linked to another amino acid residue of the sequence
  MISC_FEATURE (9)..(9): Xaa is glutamine, asparagine, methionine, serine, or an amino acid which is covalently linked to another amino acid residue of the sequence
  MISC_FEATURE (10)..(10): Xaa is lysine, arginine, or an amino acid residue which is covalently linked to another amino acid residue of the sequence
  MISC_FEATURE (11)..(11): Xaa is leucine, isoleucine, valine, phenylalanine, methionine, or an amino acid residue which is covalently linked to another amino acid residue of the sequence
  MISC_FEATURE (12)..(12): Xaa is valine, leucine, isoleucine, alanine, methionine, or an amino acid residue which is covalently linked to another amino acid residue of the sequence
  MISC_FEATURE (13)..(13): Xaa is phenylalanine, tyrosine, valine, leucine, isoleucine, methionine, or an amino acid residue which is covalently linked to another amino acid residue of the sequence
  MISC_FEATURE (14)..(14): Xaa is phenylalanine, tyrosine, valine, leucine, isoleucine, methionine, or an amino acid residue which is covalently linked to another amino acid residue of the sequence
  MISC_FEATURE (18)..(18): Xaa is valine, leucine, isoleucine, alanine, methionine, or an amino acid residue which is covalently linked to another amino acid residue of the sequence
  MISC_FEATURE (19)..(19): Xaa is glycine, alanine, serine, or an amino acid residue which is covalently linked to another amino acid residue of the sequence
  MISC_FEATURE (20)..(20): Xaa is serine, glycine, alanine, threonine, or an amino acid residue which is covalently linked to another amino acid residue of the sequence
  MISC_FEATURE (21)..(21): Xaa is asparagine, glutamine, methionine, or an amino acid residue which is covalently linked to another amino acid residue of the sequence
  MISC_FEATURE (22)..(22): Xaa is lysine, arginine, or an amino acid residue which is covalently linked to another amino acid residue of the sequence
  MISC_FEATURE (23)..(23): Xaa is glycine, alanine, serine, or an amino acid residue which is covalently linked to another amino acid residue of the sequence
  MISC_FEATURE (24)..(24): Xaa is alanine, valine, glycine, serine, or an amino acid residue which is covalently linked to another amino acid residue of the sequence
  MISC_FEATURE (25)..(25): Xaa is isoleucine, leucine, valine, phenylalanine, methionine, or an amino acid residue which is covalently linked to another amino acid residue of the sequence
  MISC_FEATURE (26)..(26): Xaa is isoleucine, leucine, valine, phenylalanine, methionine, or an amino acid residue which is covalently linked to another amino acid residue of the sequence
  MISC_FEATURE (27)..(27): Xaa is glycine, alanine, serine, or an amino acid residue which is covalently linked to another amino acid residue of the sequence
  MISC_FEATURE (28)..(28): Xaa is leucine, isoleucine, valine, phenylalanine, methionine, or an amino acid residue which is covalently linked to another amino acid residue of the sequence
  MISC_FEATURE (29)..(29): Xaa is methionine, valine, leucine, isoleucine, alanine, or an amino acid residue which is covalently linked to another amino acid residue of the sequence
  MISC_FEATURE (30)..(30): Xaa is valine, leucine, isoleucine, alanine, methionine, or an amino acid residue which is covalently linked to another amino acid residue of the sequence
  MISC_FEATURE (31)..(31): Xaa is glycine, alanine, serine, or an amino acid residue which is covalently linked to another amino acid residue of the sequence
DSGYEVHXXXXXXXAEDXXXXXXXXXXXXXX

SEQ ID NO: 828 - protein, 30 aa, Artificial Sequence
  synthetic
  MISC_FEATURE (7)..(7): Xaa is histidine, tyrosine, serine, methionine, or an amino acid residue which is covalently linked to another amino acid residue of the sequence
  MISC_FEATURE (8)..(8): Xaa is glutamine, asparagine, methionine, serine, or an amino acid which is covalently linked to another amino acid residue of the sequence
  MISC_FEATURE (9)..(9): Xaa is lysine, arginine, or an amino acid residue which is covalently linked to another amino acid residue of the sequence
  MISC_FEATURE (10)..(10): Xaa is leucine, isoleucine, valine, phenylalanine, methionine, or an amino acid residue which is covalently linked to another amino acid residue of the sequence
  MISC_FEATURE (11)..(11): Xaa is valine, leucine, isoleucine, alanine, methionine, or an amino acid residue which is covalently linked to another amino acid residue of the sequence
  MISC_FEATURE (12)..(12): Xaa is phenylalanine, tyrosine, valine, leucine, isoleucine, methionine, or an amino acid residue which is covalently linked to another amino acid residue of the sequence
  MISC_FEATURE (13)..(13): Xaa is phenylalanine, tyrosine, valine, leucine, isoleucine, methionine, or an amino acid residue which is covalently linked to another amino acid residue of the sequence
  MISC_FEATURE (17)..(17): Xaa is valine, leucine, isoleucine, alanine, methionine, or an amino acid residue which is covalently linked to another amino acid residue of the sequence
  MISC_FEATURE (18)..(18): Xaa is glycine, alanine, serine, or an amino acid residue which is covalently linked to another amino acid residue of the sequence
  MISC_FEATURE (19)..(19): Xaa is serine, glycine, alanine, threonine, or an amino acid residue which is covalently linked to another amino acid residue of the sequence
  MISC_FEATURE (20)..(20): Xaa is asparagine, glutamine, methionine, or an amino acid residue which is covalently linked to another amino acid residue of the sequence
  MISC_FEATURE (21)..(21): Xaa is lysine, arginine, or an amino acid residue which is covalently linked to another amino acid residue of the sequence
  MISC_FEATURE (22)..(22): Xaa is glycine, alanine, serine, or an amino acid residue which is covalently linked to another amino acid residue of the sequence
  MISC_FEATURE (23)..(23): Xaa is alanine, valine, glycine, serine, or an amino acid residue which is covalently linked to another amino acid residue of the sequence
  MISC_FEATURE (24)..(24): Xaa is isoleucine, leucine, valine, phenylalanine, methionine, or an amino acid residue which is covalently linked to another amino acid residue of the sequence
  MISC_FEATURE (25)..(25): Xaa is isoleucine, leucine, valine, phenylalanine, methionine, or an amino acid residue which is covalently linked to another amino acid residue of the sequence
  MISC_FEATURE (26)..(26): Xaa is glycine, alanine, serine, or an amino acid residue which is covalently linked to another amino acid residue of the sequence
  MISC_FEATURE (27)..(27): Xaa is leucine, isoleucine, valine, phenylalanine, methionine, or an amino acid residue which is covalently linked to another amino acid residue of the sequence
  MISC_FEATURE (28)..(28): Xaa is methionine, valine, leucine, isoleucine, alanine, or an amino acid residue which is covalently linked to another amino acid residue of the sequence
  MISC_FEATURE (29)..(29): Xaa is valine, leucine, isoleucine, alanine, methionine, or an amino acid residue which is covalently linked to another amino acid residue of the sequence
  MISC_FEATURE (30)..(30): Xaa is glycine, alanine, serine, or an amino acid residue which is covalently linked to another amino acid residue of the sequence
SGYEVHXXXXXXXAEDXXXXXXXXXXXXXX

SEQ ID NO: 829 - protein, 29 aa, Artificial Sequence
  synthetic
  MISC_FEATURE (6)..(6): Xaa is histidine, tyrosine, serine, methionine, or an amino acid residue which is covalently linked to another amino acid residue of the sequence
  MISC_FEATURE (7)..(7): Xaa is glutamine, asparagine, methionine, serine, or an amino acid which is covalently linked to another amino acid residue of the sequence
  MISC_FEATURE (8)..(8): Xaa is lysine, arginine, or an amino acid residue which is covalently linked to another amino acid residue of the sequence
  MISC_FEATURE (9)..(9): Xaa is leucine, isoleucine, valine, phenylalanine, methionine, or an amino acid residue which is covalently linked to another amino acid residue of the sequence
  MISC_FEATURE (10)..(10): Xaa is valine, leucine, isoleucine, alanine, methionine, or an amino acid residue which is covalently linked to another amino acid residue of the sequence
  MISC_FEATURE (11)..(11): Xaa is phenylalanine, tyrosine, valine, leucine, isoleucine, methionine, or an amino acid residue which is covalently linked to another amino acid residue of the sequence
  MISC_FEATURE (12)..(12): Xaa is phenylalanine, tyrosine, valine, leucine, isoleucine, methionine, or an amino acid residue which is covalently linked to another amino acid residue of the sequence
  MISC_FEATURE (16)..(16): Xaa is valine, leucine, isoleucine, alanine, methionine, or an amino acid residue which is covalently linked to another amino acid residue of the sequence
  MISC_FEATURE (17)..(17): Xaa is glycine, alanine, serine, or an amino acid residue which is covalently linked to another amino acid residue of the sequence
  MISC_FEATURE (18)..(18): Xaa is serine, glycine, alanine, threonine, or an amino acid residue which is covalently linked to another amino acid residue of the sequence
  MISC_FEATURE (19)..(19): Xaa is asparagine, glutamine, methionine, or an amino acid residue which is covalently linked to another amino acid residue of the sequence
  MISC_FEATURE (20)..(20): Xaa is lysine, arginine, or an amino acid residue which is covalently linked to another amino acid residue of the sequence
  MISC_FEATURE (21)..(21): Xaa is glycine, alanine, serine, or an amino acid residue which is covalently linked to another amino acid residue of the sequence
  MISC_FEATURE (22)..(22): Xaa is alanine, valine, glycine, serine, or an amino acid residue which is covalently linked to another amino acid residue of the sequence
  MISC_FEATURE (23)..(23): Xaa is isoleucine, leucine, valine, phenylalanine, methionine, or an amino acid residue which is covalently linked to another amino acid residue of the sequence
  MISC_FEATURE (24)..(24): Xaa is isoleucine, leucine, valine, phenylalanine, methionine, or an amino acid residue which is covalently linked to another amino acid residue of the sequence
  MISC_FEATURE (25)..(25): Xaa is glycine, alanine, serine, or an amino acid residue which is covalently linked to another amino acid residue of the sequence
  MISC_FEATURE (26)..(26): Xaa is leucine, isoleucine, valine, phenylalanine, methionine, or an amino acid residue which is covalently linked to another amino acid residue of the sequence
  MISC_FEATURE (27)..(27): Xaa is methionine, valine, leucine, isoleucine, alanine, or an amino acid residue which is covalently linked to another amino acid residue of the sequence
  MISC_FEATURE (28)..(28): Xaa is valine, leucine, isoleucine, alanine, methionine, or an amino acid residue which is covalently linked to another amino acid residue of the sequence
  MISC_FEATURE (29)..(29): Xaa is glycine, alanine, serine, or an amino acid residue which is covalently linked to another amino acid residue of the sequence
GYEVHXXXXXXXAEDXXXXXXXXXXXXXX

SEQ ID NO: 830 - protein, 28 aa, Artificial Sequence
  synthetic
  MISC_FEATURE (5)..(5): Xaa is histidine, tyrosine, serine, methionine, or an amino acid residue which is covalently linked to another amino acid residue of the sequence
  MISC_FEATURE (6)..(6): Xaa is glutamine, asparagine, methionine, serine, or an amino acid which is covalently linked to another amino acid residue of the sequence
  MISC_FEATURE (7)..(7): Xaa is lysine, arginine, or an amino acid residue which is covalently linked to another amino acid residue of the sequence
  MISC_FEATURE (8)..(8): Xaa is leucine, isoleucine, valine, phenylalanine, methionine, or an amino acid residue which is covalently linked to another amino acid residue of the sequence
  MISC_FEATURE (9)..(9): Xaa is valine, leucine, isoleucine, alanine, methionine, or an amino acid residue which is covalently linked to another amino acid residue of the sequence
  MISC_FEATURE (10)..(10): Xaa is phenylalanine, tyrosine, valine, leucine, isoleucine, methionine, or an amino acid residue which is covalently linked to another amino acid residue of the sequence
  MISC_FEATURE (11)..(11): Xaa is phenylalanine, tyrosine, valine, leucine, isoleucine, methionine, or an amino acid residue which is covalently linked to another amino acid residue of the sequence
  MISC_FEATURE (15)..(15): Xaa is valine, leucine, isoleucine, alanine, methionine, or an amino acid residue which is covalently linked to another amino acid residue of the sequence
  MISC_FEATURE (16)..(16): Xaa is glycine, alanine, serine, or an amino acid residue which is covalently linked to another amino acid residue of the sequence
  MISC_FEATURE (17)..(17): Xaa is serine, glycine, alanine, threonine, or an amino acid residue which is covalently linked to another amino acid residue of the sequence
  MISC_FEATURE (18)..(18): Xaa is asparagine, glutamine, methionine, or an amino acid residue which is covalently linked to another amino acid residue of the sequence
  MISC_FEATURE (19)..(19): Xaa is lysine, arginine, or an amino acid residue which is covalently linked to another amino acid residue of the sequence
  MISC_FEATURE (20)..(20): Xaa is glycine, alanine, serine, or an amino acid residue which is covalently linked to another amino acid residue of the sequence
  MISC_FEATURE (21)..(21): Xaa is alanine, valine, glycine, serine, or an amino acid residue which is covalently linked to another amino acid residue of the sequence
  MISC_FEATURE (22)..(22): Xaa is isoleucine, leucine, valine, phenylalanine, methionine, or an amino acid residue which is covalently linked to another amino acid residue of the sequence
  MISC_FEATURE (23)..(23): Xaa is isoleucine, leucine, valine, phenylalanine, methionine, or an amino acid residue which is covalently linked to another amino acid residue of the sequence
  MISC_FEATURE (24)..(24): Xaa is glycine, alanine, serine, or an amino acid residue which is covalently linked to another amino acid residue of the sequence
  MISC_FEATURE (25)..(25): Xaa is leucine, isoleucine, valine, phenylalanine, methionine, or an amino acid residue which is covalently linked to another amino acid residue of the sequence
  MISC_FEATURE (26)..(26): Xaa is methionine, valine, leucine, isoleucine, alanine, or an amino acid residue which is covalently linked to another amino acid residue of the sequence
  MISC_FEATURE (27)..(27): Xaa is valine, leucine, isoleucine, alanine, methionine, or an amino acid residue which is covalently linked to another amino acid residue of the sequence
  MISC_FEATURE (28)..(28): Xaa is glycine, alanine, serine, or an amino acid residue which is covalently linked to another amino acid residue of the sequence
YEVHXXXXXXXAEDXXXXXXXXXXXXXX

SEQ ID NO: 831 - protein, 27 aa, Artificial Sequence
  synthetic
  MISC_FEATURE (4)..(4): Xaa is histidine, tyrosine, serine, methionine, or an amino acid residue which is covalently linked to another amino acid residue of the sequence
  MISC_FEATURE (5)..(5): Xaa is glutamine, asparagine, methionine, serine, or an amino acid which is covalently linked to another amino acid residue of the sequence
  MISC_FEATURE (6)..(6): Xaa is lysine, arginine, or an amino acid residue which is covalently linked to another amino acid residue of the sequence
  MISC_FEATURE (7)..(7): Xaa is leucine, isoleucine, valine, phenylalanine, methionine, or an amino acid residue which is covalently linked to another amino acid residue of the sequence
  MISC_FEATURE (8)..(8): Xaa is valine, leucine, isoleucine, alanine, methionine, or an amino acid residue which is covalently linked to another amino acid residue of the sequence
  MISC_FEATURE (9)..(9): Xaa is phenylalanine, tyrosine, valine, leucine, isoleucine, methionine, or an amino acid residue which is covalently linked to another amino acid residue of the sequence
  MISC_FEATURE (10)..(10): Xaa is phenylalanine, tyrosine, valine, leucine, isoleucine, methionine, or an amino acid residue which is covalently linked to another amino acid residue of the sequence
  MISC_FEATURE (14)..(14): Xaa is valine, leucine, isoleucine, alanine, methionine, or an amino acid residue which is covalently linked to another amino acid residue of the sequence
  MISC_FEATURE (15)..(15): Xaa is glycine, alanine, serine, or an amino acid residue which is covalently linked to another amino acid residue of the sequence
  MISC_FEATURE (16)..(16): Xaa is serine, glycine, alanine, threonine, or an amino acid residue which is covalently linked to another amino acid residue of the sequence
  MISC_FEATURE (17)..(17): Xaa is asparagine, glutamine, methionine, or an amino acid residue which is covalently linked to another amino acid residue of the sequence
  MISC_FEATURE (18)..(18): Xaa is lysine, arginine, or an amino acid residue which is covalently linked to another amino acid residue of the sequence
  MISC_FEATURE (19)..(19): Xaa is glycine, alanine, serine, or an amino acid residue which is covalently linked to another amino acid residue of the sequence
  MISC_FEATURE (20)..(20): Xaa is alanine, valine, glycine, serine, or an amino acid residue which is covalently linked to another amino acid residue of the sequence
  MISC_FEATURE (21)..(21): Xaa is isoleucine, leucine, valine, phenylalanine, methionine, or an amino acid residue which is covalently linked to another amino acid residue of the sequence
  MISC_FEATURE (22)..(22): Xaa is isoleucine, leucine, valine, phenylalanine, methionine, or an amino acid residue which is covalently linked to another amino acid residue of the sequence
  MISC_FEATURE (23)..(23): Xaa is glycine, alanine, serine, or an amino acid residue which is covalently linked to another amino acid residue of the sequence
  MISC_FEATURE (24)..(24): Xaa is leucine, isoleucine, valine, phenylalanine, methionine, or an amino acid residue which is covalently linked to another amino acid residue of the sequence
  MISC_FEATURE (25)..(25): Xaa is methionine, valine, leucine, isoleucine, alanine, or an amino acid residue which is covalently linked to another amino acid residue of the sequence
  MISC_FEATURE (26)..(26): Xaa is valine, leucine, isoleucine, alanine, methionine, or an amino acid residue which is covalently linked to another amino acid residue of the sequence
  MISC_FEATURE (27)..(27): Xaa is glycine, alanine, serine, or an amino acid residue which is covalently linked to another amino acid residue of the sequence
EVHXXXXXXXAEDXXXXXXXXXXXXXX

SEQ ID NO: 832 - protein, 26 aa, Artificial Sequence
  synthetic
  MISC_FEATURE (3)..(3): Xaa is histidine, tyrosine, serine, methionine, or an amino acid residue which is covalently linked to another amino acid residue of the sequence
  MISC_FEATURE (4)..(4): Xaa is glutamine, asparagine, methionine, serine, or an amino acid which is covalently linked to another amino acid residue of the sequence
  MISC_FEATURE (5)..(5): Xaa is lysine, arginine, or an amino acid residue which is covalently linked to another amino acid residue of the sequence
  MISC_FEATURE (6)..(6): Xaa is leucine, isoleucine, valine, phenylalanine, methionine, or an amino acid residue which is covalently linked to another amino acid residue of the sequence
  MISC_FEATURE (7)..(7): Xaa is valine, leucine, isoleucine, alanine, methionine, or an amino acid residue which is covalently linked to another amino acid residue of the sequence
  MISC_FEATURE (8)..(8): Xaa is phenylalanine, tyrosine, valine, leucine, isoleucine, methionine, or an amino acid residue which is covalently linked to another amino acid residue of the sequence
  MISC_FEATURE (9)..(9): Xaa is phenylalanine, tyrosine, valine, leucine, isoleucine, methionine, or an amino acid residue which is covalently linked to another amino acid residue of the sequence
  MISC_FEATURE (13)..(13): Xaa is valine, leucine, isoleucine, alanine, methionine, or an amino acid residue which is covalently linked to another amino acid residue of the sequence
  MISC_FEATURE (14)..(14): Xaa is glycine, alanine, serine, or an amino acid residue which is covalently linked to another amino acid residue of the sequence
  MISC_FEATURE (15)..(15): Xaa is serine, glycine, alanine, threonine, or an amino acid residue which is covalently linked to another amino acid residue of the sequence
  MISC_FEATURE (16)..(16): Xaa is asparagine, glutamine, methionine, or an amino acid residue which is covalently linked to another amino acid residue of the sequence
  MISC_FEATURE (17)..(17): Xaa is lysine, arginine, or an amino acid residue which is covalently linked to another amino acid residue of the sequence
  MISC_FEATURE (18)..(18): Xaa is glycine, alanine, serine, or an amino acid residue which is covalently linked to another amino acid residue of the sequence
  MISC_FEATURE (19)..(19): Xaa is alanine, valine, glycine, serine, or an amino acid residue which is covalently linked to another amino acid residue of the sequence
  MISC_FEATURE (20)..(20): Xaa is isoleucine, leucine, valine, phenylalanine, methionine, or an amino acid residue which is covalently linked to another amino acid residue of the sequence
  MISC_FEATURE (21)..(21): Xaa is isoleucine, leucine, valine, phenylalanine, methionine, or an amino acid residue which is covalently linked to another amino acid residue of the sequence
  MISC_FEATURE (22)..(22): Xaa is glycine, alanine, serine, or an amino acid residue which is covalently linked to another amino acid residue of the sequence
  MISC_FEATURE (23)..(23): Xaa is leucine, isoleucine, valine, phenylalanine, methionine, or an amino acid residue which is covalently linked to another amino acid residue of the sequence
  MISC_FEATURE (24)..(24): Xaa is methionine, valine, leucine, isoleucine, alanine, or an amino acid residue which is covalently linked to another amino acid residue of the sequence
  MISC_FEATURE (25)..(25): Xaa is valine, leucine, isoleucine, alanine, methionine, or an amino acid residue which is covalently linked to another amino acid residue of the sequence
  MISC_FEATURE (26)..(26): Xaa is glycine, alanine, serine, or an amino acid residue which is covalently linked to another amino acid residue of the sequence
VHXXXXXXXAEDXXXXXXXXXXXXXX

SEQ ID NO: 833 - protein, 25 aa, Artificial Sequence
  synthetic
  MISC_FEATURE (2)..(2): Xaa is histidine, tyrosine, serine, methionine, or an amino acid residue which is covalently linked to another amino acid residue of the sequence
  MISC_FEATURE (3)..(3): Xaa is glutamine, asparagine, methionine, serine, or an amino acid which is covalently linked to another amino acid residue of the sequence
  MISC_FEATURE (4)..(4): Xaa is lysine, arginine, or an amino acid residue which is covalently linked to another amino acid residue of the sequence
  MISC_FEATURE (5)..(5): Xaa is leucine, isoleucine, valine, phenylalanine, methionine, or an amino acid residue which is covalently linked to another amino acid residue of the sequence
  MISC_FEATURE (6)..(6): Xaa is valine, leucine, isoleucine, alanine, methionine, or an amino acid residue which is covalently linked to another amino acid residue of the sequence
  MISC_FEATURE (7)..(7): Xaa is phenylalanine, tyrosine, valine, leucine, isoleucine, methionine, or an amino acid residue which is covalently linked to another amino acid residue of the sequence
  MISC_FEATURE (8)..(8): Xaa is phenylalanine, tyrosine, valine, leucine, isoleucine, methionine, or an amino acid residue which is covalently linked to another amino acid residue of the sequence
  MISC_FEATURE (12)..(12): Xaa is valine, leucine, isoleucine, alanine, methionine, or an amino acid residue which is covalently linked to another amino acid residue of the sequence
  MISC_FEATURE (13)..(13): Xaa is glycine, alanine, serine, or an amino acid residue which is covalently linked to another amino acid residue of the sequence
  MISC_FEATURE (14)..(14): Xaa is serine, glycine, alanine, threonine, or an amino acid residue which is covalently linked to another amino acid residue of the sequence
  MISC_FEATURE (15)..(15): Xaa is asparagine, glutamine, methionine, or an amino acid residue which is covalently linked to another amino acid residue of the sequence
  MISC_FEATURE (16)..(16): Xaa is lysine, arginine, or an amino acid residue which is covalently linked to another amino acid residue of the sequence
  MISC_FEATURE (17)..(17): Xaa is glycine, alanine, serine, or an amino acid residue which is covalently linked to another amino acid residue of the sequence
  MISC_FEATURE (18)..(18): Xaa is alanine, valine, glycine, serine, or an amino acid residue which is covalently linked to another amino acid residue of the sequence
  MISC_FEATURE (19)..(19): Xaa is isoleucine, leucine, valine, phenylalanine, methionine, or an amino acid residue which is covalently linked to another amino acid residue of the sequence
  MISC_FEATURE (20)..(20): Xaa is isoleucine, leucine, valine, phenylalanine, methionine, or an amino acid residue which is covalently linked to another amino acid residue of the sequence
  MISC_FEATURE (21)..(21): Xaa is glycine, alanine, serine, or an amino acid residue which is covalently linked to another amino acid residue of the sequence
  MISC_FEATURE (22)..(22): Xaa is leucine, isoleucine, valine, phenylalanine, methionine, or an amino acid residue which is covalently linked to another amino acid residue of the sequence
  MISC_FEATURE (23)..(23): Xaa is methionine, valine, leucine, isoleucine, alanine, or an amino acid residue which is covalently linked to another amino acid residue of the sequence
  MISC_FEATURE (24)..(24): Xaa is valine, leucine, isoleucine, alanine, methionine, or an amino acid residue which is covalently linked to another amino acid residue of the sequence
  MISC_FEATURE (25)..(25): Xaa is glycine, alanine, serine, or an amino acid residue which is covalently linked to another amino acid residue of the sequence
HXXXXXXXAEDXXXXXXXXXXXXXX

SEQ ID NO: 834 - protein, 24 aa, Artificial Sequence
  synthetic
  MISC_FEATURE (1)..(1): Xaa is histidine, tyrosine, serine, methionine, or an amino acid residue which is covalently linked to another amino acid residue of the sequence
  MISC_FEATURE (2)..(2): Xaa is glutamine, asparagine, methionine, serine, or an amino acid which is covalently linked to another amino acid residue of the sequence
  MISC_FEATURE (3)..(3): Xaa is lysine, arginine, or an amino acid residue which is covalently linked to another amino acid residue of the sequence
  MISC_FEATURE (4)..(4): Xaa is leucine, isoleucine, valine, phenylalanine, methionine, or an amino acid residue which is covalently linked to another amino acid residue of the sequence
  MISC_FEATURE (5)..(5): Xaa is valine, leucine, isoleucine, alanine, methionine, or an amino acid residue which is covalently linked to another amino acid residue of the sequence
  MISC_FEATURE (6)..(6): Xaa is phenylalanine, tyrosine, valine, leucine, isoleucine, methionine, or an amino acid residue which is covalently linked to another amino acid residue of the sequence
  MISC_FEATURE (7)..(7): Xaa is phenylalanine, tyrosine, valine, leucine, isoleucine, methionine, or an amino acid residue which is covalently linked to another amino acid residue of the sequence
  MISC_FEATURE (11)..(11): Xaa is valine, leucine, isoleucine, alanine, methionine, or an amino acid residue which is covalently linked to another amino acid residue of the sequence
  MISC_FEATURE (12)..(12): Xaa is glycine, alanine, serine, or an amino acid residue which is covalently linked to another amino acid residue of the sequence
  MISC_FEATURE (13)..(13): Xaa is serine, glycine, alanine, threonine, or an amino acid residue which is covalently linked to another amino acid residue of the sequence
  MISC_FEATURE (14)..(14): Xaa is asparagine, glutamine, methionine, or an amino acid residue which is covalently linked to another amino acid residue of the sequence
  MISC_FEATURE (15)..(15): Xaa is lysine, arginine, or an amino acid residue which is covalently linked to another amino acid residue of the sequence
  MISC_FEATURE (16)..(16): Xaa is glycine, alanine, serine, or an amino acid residue which is covalently linked to another amino acid residue of the sequence
  MISC_FEATURE (17)..(17): Xaa is alanine, valine, glycine, serine, or an amino acid residue which is covalently linked to another amino acid residue of the sequence
  MISC_FEATURE (18)..(18): Xaa is isoleucine, leucine, valine, phenylalanine, methionine, or an amino acid residue which is covalently linked to another amino acid residue of the sequence
  MISC_FEATURE (19)..(19): Xaa is isoleucine, leucine, valine, phenylalanine, methionine, or an amino acid residue which is covalently linked to another amino acid residue of the sequence
  MISC_FEATURE (20)..(20): Xaa is glycine, alanine, serine, or an amino acid residue which is covalently linked to another amino acid residue of the sequence
  MISC_FEATURE (21)..(21): Xaa is leucine, isoleucine, valine, phenylalanine, methionine, or an amino acid residue which is covalently linked to another amino acid residue of the sequence
  MISC_FEATURE (22)..(22): Xaa is methionine, valine, leucine, isoleucine, alanine, or an amino acid residue which is covalently linked to another amino acid residue of the sequence
  MISC_FEATURE (23)..(23): Xaa is valine, leucine, isoleucine, alanine, methionine, or an amino acid residue which is covalently linked to another amino acid residue of the sequence
  MISC_FEATURE (24)..(24): Xaa is glycine, alanine, serine, or an amino acid residue which is covalently linked to another amino acid residue of the sequence
XXXXXXXAEDXXXXXXXXXXXXXX

SEQ ID NO: 835 - protein, 23 aa, Artificial Sequence
  synthetic
  MISC_FEATURE (1)..(1): Xaa is glutamine, asparagine, methionine, serine, or an amino acid which is covalently linked to another amino acid residue of the sequence
  MISC_FEATURE (2)..(2): Xaa is lysine, arginine, or an amino acid residue which is covalently linked to another amino acid residue of the sequence
  MISC_FEATURE (3)..(3): Xaa is leucine, isoleucine, valine, phenylalanine, methionine, or an amino acid residue which is covalently linked to another amino acid residue of the sequence
  MISC_FEATURE (4)..(4): Xaa is valine, leucine, isoleucine, alanine, methionine, or an amino acid residue which is covalently linked to another amino acid residue of the sequence
  MISC_FEATURE (5)..(5): Xaa is phenylalanine, tyrosine, valine, leucine, isoleucine, methionine, or an amino acid residue which is covalently linked to another amino acid residue of the sequence
  MISC_FEATURE (6)..(6): Xaa is phenylalanine, tyrosine, valine, leucine, isoleucine, methionine, or an amino acid residue which is covalently linked to another amino acid residue of the sequence
  MISC_FEATURE (10)..(10): Xaa is valine, leucine, isoleucine, alanine, methionine, or an amino acid residue which is covalently linked to another amino acid residue of the sequence
  MISC_FEATURE (11)..(11): Xaa is glycine, alanine, serine, or an amino acid residue which is covalently linked to another amino acid residue of the sequence
  MISC_FEATURE (12)..(12): Xaa is serine, glycine, alanine, threonine, or an amino acid residue which is covalently linked to another amino acid residue of the sequence
  MISC_FEATURE (13)..(13): Xaa is asparagine, glutamine, methionine, or an amino acid residue which is covalently linked to another amino acid residue of the sequence
  MISC_FEATURE (14)..(14): Xaa is lysine, arginine, or an amino acid residue which is covalently linked to another amino acid residue of the sequence
  MISC_FEATURE (15)..(15): Xaa is glycine, alanine, serine, or an amino acid residue which is covalently linked to another amino acid residue of the sequence
  MISC_FEATURE (16)..(16): Xaa is alanine, valine, glycine, serine, or an amino acid residue which is covalently linked to another amino acid residue of the sequence
  MISC_FEATURE (17)..(17): Xaa is isoleucine, leucine, valine, phenylalanine, methionine, or an amino acid residue which is covalently linked to another amino acid residue of the sequence
  MISC_FEATURE (18)..(18): Xaa is isoleucine, leucine, valine, phenylalanine, methionine, or an amino acid residue which is covalently linked to another amino acid residue of the sequence
  MISC_FEATURE (19)..(19): Xaa is glycine, alanine, serine, or an amino acid residue which is covalently linked to another amino acid residue of the sequence
  MISC_FEATURE (20)..(20): Xaa is leucine, isoleucine, valine, phenylalanine, methionine, or an amino acid residue which is covalently linked to another amino acid residue of the sequence
  MISC_FEATURE (21)..(21): Xaa is methionine, valine, leucine, isoleucine, alanine, or an amino acid residue which is covalently linked to another amino acid residue of the sequence
  MISC_FEATURE (22)..(22): Xaa is valine, leucine, isoleucine, alanine, methionine, or an amino acid residue which is covalently linked to another amino acid residue of the sequence
XXXXXXAEDXXXXXXXXXXXXXG

SEQ ID NO: 836 - protein, 22 aa, Artificial Sequence
  synthetic
  MISC_FEATURE (1)..(1): Xaa is lysine, arginine, or an amino acid residue which is covalently linked to another amino acid residue of the sequence
  MISC_FEATURE (2)..(2): Xaa is leucine, isoleucine, valine, phenylalanine, methionine, or an amino acid residue which is covalently linked to another amino acid residue of the sequence
  MISC_FEATURE (3)..(3): Xaa is valine, leucine, isoleucine, alanine, methionine, or an amino acid residue which is covalently linked to another amino acid residue of the sequence
  MISC_FEATURE (4)..(4): Xaa is phenylalanine, tyrosine, valine, leucine, isoleucine, methionine, or an amino acid residue which is covalently linked to another amino acid residue of the sequence
  MISC_FEATURE (5)..(5): Xaa is phenylalanine, tyrosine, valine, leucine, isoleucine, methionine, or an amino acid residue which is covalently linked to another amino acid residue of the sequence
  MISC_FEATURE (9)..(9): Xaa is valine, leucine, isoleucine, alanine, methionine, or an amino acid residue which is covalently linked to another amino acid residue of the sequence
  MISC_FEATURE (10)..(10): Xaa is glycine, alanine, serine, or an amino acid residue which is covalently linked to another amino acid residue of the sequence
  MISC_FEATURE (11)..(11): Xaa is serine, glycine, alanine, threonine, or an amino acid residue which is covalently linked to another amino acid residue of the sequence
  MISC_FEATURE (12)..(12): Xaa is asparagine, glutamine, methionine, or an amino acid residue which is covalently linked to another amino acid residue of the sequence
  MISC_FEATURE (13)..(13): Xaa is lysine, arginine, or an amino acid residue which is covalently linked to another amino acid residue of the sequence
  MISC_FEATURE (14)..(14): Xaa is glycine, alanine, serine, or an amino acid residue which is covalently linked to another amino acid residue of the sequence
  MISC_FEATURE (15)..(15): Xaa is alanine, valine, glycine, serine, or an amino acid residue which is covalently linked to another amino acid residue of the sequence
  MISC_FEATURE (16)..(16): Xaa is isoleucine, leucine, valine, phenylalanine, methionine, or an amino acid residue which is covalently linked to another amino acid residue of the sequence
  MISC_FEATURE (17)..(17): Xaa is isoleucine, leucine, valine, phenylalanine, methionine, or an amino acid residue which is covalently linked to another amino acid residue of the sequence
  MISC_FEATURE (18)..(18): Xaa is glycine, alanine, serine, or an amino acid residue which is covalently linked to another amino acid residue of the sequence
  MISC_FEATURE (19)..(19): Xaa is leucine, isoleucine, valine, phenylalanine, methionine, or an amino acid residue which is covalently linked to another amino acid residue of the sequence
  MISC_FEATURE (20)..(20): Xaa is methionine, valine, leucine, isoleucine, alanine, or an amino acid residue which is covalently linked to another amino acid residue of the sequence
XXXXXAEDXXXXXXXXXXXXVG

SEQ ID NO: 837 - protein, 21 aa, Artificial Sequence
  synthetic
  MISC_FEATURE (1)..(1): Xaa is leucine, isoleucine, valine, phenylalanine, methionine, or an amino acid residue which is covalently linked to another amino acid residue of the sequence
  MISC_FEATURE (2)..(2): Xaa is valine, leucine, isoleucine, alanine, methionine, or an amino acid residue which is covalently linked to another amino acid residue of the sequence
  MISC_FEATURE (3)..(3): Xaa is phenylalanine, tyrosine, valine, leucine, isoleucine, methionine, or an amino acid residue which is covalently linked to another amino acid residue of the sequence
  MISC_FEATURE (4)..(4): Xaa is phenylalanine, tyrosine, valine, leucine, isoleucine, methionine, or an amino acid residue which is covalently linked to another amino acid residue of the sequence
  MISC_FEATURE (8)..(8): Xaa is valine, leucine, isoleucine, alanine, methionine, or an amino acid residue which is covalently linked to another amino acid residue of the sequence
  MISC_FEATURE (9)..(9): Xaa is glycine, alanine, serine, or an amino acid residue which is covalently linked to another amino acid residue of the sequence
  MISC_FEATURE (10)..(10): Xaa is serine, glycine, alanine, threonine, or an amino acid residue which is covalently linked to another amino acid residue of the sequence
  MISC_FEATURE (11)..(11): Xaa is asparagine, glutamine, methionine, or an amino acid residue which is covalently linked to another amino acid residue of the sequence
  MISC_FEATURE (12)..(12): Xaa is lysine, arginine, or an amino acid residue which is covalently linked to another amino acid residue of the sequence
  MISC_FEATURE (13)..(13): Xaa is glycine, alanine, serine, or an amino acid residue which is covalently linked to another amino acid residue of the sequence
  MISC_FEATURE (14)..(14): Xaa is alanine, valine, glycine, serine, or an amino acid residue which is covalently linked to another amino acid residue of the sequence
  MISC_FEATURE (15)..(15): Xaa is isoleucine, leucine, valine, phenylalanine, methionine, or an amino acid residue which is covalently linked to another amino acid residue of the sequence
  MISC_FEATURE (16)..(16): Xaa is isoleucine, leucine, valine, phenylalanine, methionine, or an amino acid residue which is covalently linked to another amino acid residue of the sequence
  MISC_FEATURE (17)..(17): Xaa is glycine, alanine, serine, or an amino acid residue which is covalently linked to another amino acid residue of the sequence
  MISC_FEATURE (18)..(18): Xaa is leucine, isoleucine, valine, phenylalanine, methionine, or an amino acid residue which is covalently linked to another amino acid residue of the sequence
XXXXAEDXXXXXXXXXXXMVG

SEQ ID NO: 838 - protein, 20 aa, Artificial Sequence
  synthetic
  MISC_FEATURE (1)..(1): Xaa is valine, leucine, isoleucine, alanine, methionine, or an amino acid residue which is covalently linked to another amino acid residue of the sequence
  MISC_FEATURE (2)..(2): Xaa is phenylalanine, tyrosine, valine, leucine, isoleucine, methionine, or an amino acid residue which is covalently linked to another amino acid residue of the sequence
  MISC_FEATURE (3)..(3): Xaa is phenylalanine, tyrosine, valine, leucine, isoleucine, methionine, or an amino acid residue which is covalently linked to another amino acid residue of the sequence
  MISC_FEATURE (7)..(7): Xaa is valine, leucine, isoleucine, alanine, methionine, or an amino acid residue which is covalently linked to another amino acid residue of the sequence
  MISC_FEATURE (8)..(8): Xaa is glycine, alanine, serine, or an amino acid residue which is covalently linked to another amino acid residue of the sequence
  MISC_FEATURE (9)..(9): Xaa is serine, glycine, alanine, threonine, or an amino acid residue which is covalently linked to another amino acid residue of the sequence
  MISC_FEATURE (10)..(10): Xaa is asparagine, glutamine, methionine, or an amino acid residue which is covalently linked to another amino acid residue of the sequence
  MISC_FEATURE (11)..(11): Xaa is lysine, arginine, or an amino acid residue which is covalently linked to another amino acid residue of the sequence
  MISC_FEATURE (12)..(12): Xaa is glycine, alanine, serine, or an amino acid residue which is covalently linked to another amino acid residue of the sequence
  MISC_FEATURE (13)..(13): Xaa is alanine, valine, glycine, serine, or an amino acid residue which is covalently linked to another amino acid residue of the sequence
  MISC_FEATURE (14)..(14): Xaa is isoleucine, leucine, valine, phenylalanine, methionine, or an amino acid residue which is covalently linked to another amino acid residue of the sequence
  MISC_FEATURE (15)..(15): Xaa is isoleucine, leucine, valine, phenylalanine, methionine, or an amino acid residue which is covalently linked to another amino acid residue of the sequence
  MISC_FEATURE (16)..(16): Xaa is glycine, alanine, serine, or an amino acid residue which is covalently linked to another amino acid residue of the sequence
XXXAEDXXXXXXXXXXLMVG

SEQ ID NO: 839 - protein, 19 aa, Artificial Sequence
  synthetic
  MISC_FEATURE (1)..(1): Xaa is phenylalanine, tyrosine, valine, leucine, isoleucine, methionine, or an amino acid residue which is covalently linked to another amino acid residue of the sequence
  MISC_FEATURE (2)..(2): Xaa is phenylalanine, tyrosine, valine, leucine, isoleucine, methionine, or an amino acid residue which is covalently linked to another amino acid residue of the sequence
  MISC_FEATURE (6)..(6): Xaa is valine, leucine, isoleucine, alanine, methionine, or an amino acid residue which is covalently linked to another amino acid residue of the sequence
  MISC_FEATURE (7)..(7): Xaa is glycine, alanine, serine, or an amino acid residue which is covalently linked to another amino acid residue of the sequence
  MISC_FEATURE (8)..(8): Xaa is serine, glycine, alanine, threonine, or an amino acid residue which is covalently linked to another amino acid residue of the sequence
  MISC_FEATURE (9)..(9): Xaa is asparagine, glutamine, methionine, or an amino acid residue which is covalently linked to another amino acid residue of the sequence
  MISC_FEATURE (10)..(10): Xaa is lysine, arginine, or an amino acid residue which is covalently linked to another amino acid residue of the sequence
  MISC_FEATURE (11)..(11): Xaa is glycine, alanine, serine, or an amino acid residue which is covalently linked to another amino acid residue of the sequence
  MISC_FEATURE (12)..(12): Xaa is alanine, valine, glycine, serine, or an amino acid residue which is covalently linked to another amino acid residue of the sequence
  MISC_FEATURE (13)..(13): Xaa is isoleucine, leucine, valine, phenylalanine, methionine, or an amino acid residue which is covalently linked to another amino acid residue of the sequence
  MISC_FEATURE (14)..(14): Xaa is isoleucine, leucine, valine, phenylalanine, methionine, or an amino acid residue which is covalently linked to another amino acid residue of the sequence
XXAEDXXXXXXXXXGLMVG

SEQ ID NO: 840 - protein, 18 aa, Artificial Sequence
  synthetic
  MISC_FEATURE (1)..(1): Xaa is phenylalanine, tyrosine, valine, leucine, isoleucine, methionine, or an amino acid residue which is covalently linked to another amino acid residue of the sequence
  MISC_FEATURE (5)..(5): Xaa is valine, leucine, isoleucine, alanine, methionine, or an amino acid residue which is covalently linked to another amino acid residue of the sequence
  MISC_FEATURE (6)..(6): Xaa is glycine, alanine, serine, or an amino acid residue which is covalently linked to another amino acid residue of the sequence
  MISC_FEATURE (7)..(7): Xaa is serine, glycine, alanine, threonine, or an amino acid residue which is covalently linked to another amino acid residue of the sequence
  MISC_FEATURE (8)..(8): Xaa is asparagine, glutamine, methionine, or an amino acid residue which is covalently linked to another amino acid residue of the sequence
  MISC_FEATURE (9)..(9): Xaa is lysine, arginine, or an amino acid residue which is covalently linked to another amino acid residue of the sequence
  MISC_FEATURE (10)..(10): Xaa is glycine, alanine, serine, or an amino acid residue which is covalently linked to another amino acid residue of the sequence
  MISC_FEATURE (11)..(11): Xaa is alanine, valine, glycine, serine, or an amino acid residue which is covalently linked to another amino acid residue of the sequence
  MISC_FEATURE (12)..(12): Xaa is isoleucine, leucine, valine, phenylalanine, methionine, or an amino acid residue which is covalently linked to another amino acid residue of the sequence
XAEDXXXXXXXXIGLMVG

SEQ ID NO: 841 - protein, 36 aa, Artificial Sequence
  synthetic
  MISC_FEATURE (15)..(15): Xaa is glutamine, asparagine, methionine, serine, or an amino acid which is covalently linked to another amino acid residue of the sequence
  MISC_FEATURE (16)..(16): Xaa is lysine, arginine, or an amino acid residue which is covalently linked to another amino acid residue of the sequence
  MISC_FEATURE (17)..(17): Xaa is leucine, isoleucine, valine, phenylalanine, methionine, or an amino acid residue which is covalently linked to another amino acid residue of the sequence
  MISC_FEATURE (18)..(18): Xaa is valine, leucine, isoleucine, alanine, methionine, or an amino acid residue which is covalently linked to another amino acid residue of the sequence
  MISC_FEATURE (19)..(19): Xaa is phenylalanine, tyrosine, valine, leucine, isoleucine, methionine, or an amino acid residue which is covalently linked to another amino acid residue of the sequence
  MISC_FEATURE (20)..(20): Xaa is phenylalanine, tyrosine, valine, leucine, isoleucine, methionine, or an amino acid residue which is covalently linked to another amino acid residue of the sequence
  MISC_FEATURE (24)..(24): Xaa is valine, leucine, isoleucine, alanine, methionine, or an amino acid residue which is covalently linked to another amino acid residue of the sequence
  MISC_FEATURE (25)..(25): Xaa is glycine, alanine, serine, or an amino acid residue which is covalently linked to another amino acid residue of the sequence
  MISC_FEATURE (26)..(26): Xaa is serine, glycine, alanine, threonine, or an amino acid residue which is covalently linked to another amino acid residue of the sequence
  MISC_FEATURE (27)..(27): Xaa is asparagine, glutamine, methionine, or an amino acid residue which is covalently linked to another amino acid residue of the sequence
  MISC_FEATURE (28)..(28): Xaa is lysine, arginine, or an amino acid residue which is covalently linked to another amino acid residue of the sequence
  MISC_FEATURE (29)..(29): Xaa is glycine, alanine, serine, or an amino acid residue which is covalently linked to another amino acid residue of the sequence
  MISC_FEATURE (30)..(30): Xaa is alanine, valine, glycine, serine, or an amino acid residue which is covalently linked to another amino acid residue of the sequence
  MISC_FEATURE (31)..(31): Xaa is isoleucine, leucine, valine, phenylalanine, methionine, or an amino acid residue which is covalently linked to another amino acid residue of the sequence
  MISC_FEATURE (32)..(32): Xaa is isoleucine, leucine, valine, phenylalanine, methionine, or an amino acid residue which is covalently linked to another amino acid residue of the sequence
  MISC_FEATURE (33)..(33): Xaa is glycine, alanine, serine, or an amino acid residue which is covalently linked to another amino acid residue of the sequence
  MISC_FEATURE (34)..(34): Xaa is leucine, isoleucine, valine, phenylalanine, methionine, or an amino acid residue which is covalently linked to another amino acid residue of the sequence
  MISC_FEATURE (35)..(35): Xaa is methionine, valine, leucine, isoleucine, alanine, or an amino acid residue which is covalently linked to another amino acid residue of the sequence
  MISC_FEATURE (36)..(36): Xaa is valine, leucine, isoleucine, alanine, methionine, or an amino acid residue which is covalently linked to another amino acid residue of the sequence
DAEFRHDSGYEVHHXXXXXXAEDXXXXXXXXXXXXX

SEQ ID NO: 842 - protein, 35 aa, Artificial Sequence
  synthetic
  MISC_FEATURE (14)..(14): Xaa is glutamine, asparagine, methionine, serine, or an amino acid which is covalently linked to another amino acid residue of the sequence
  MISC_FEATURE (15)..(15): Xaa is lysine, arginine, or an amino acid residue which is covalently linked to another amino acid residue of the sequence
  MISC_FEATURE (16)..(16): Xaa is leucine, isoleucine, valine, phenylalanine, methionine, or an amino acid residue which is covalently linked to another amino acid residue of the sequence
  MISC_FEATURE (17)..(17): Xaa is valine, leucine, isoleucine, alanine, methionine, or an amino acid residue which is covalently linked to another amino acid residue of the sequence
  MISC_FEATURE (18)..(18): Xaa is phenylalanine, tyrosine, valine, leucine, isoleucine, methionine, or an amino acid residue which is covalently linked to another amino acid residue of the sequence
  MISC_FEATURE (19)..(19): Xaa is phenylalanine, tyrosine, valine, leucine, isoleucine, methionine, or an amino acid residue which is covalently linked to another amino acid residue of the sequence
  MISC_FEATURE (23)..(23): Xaa is valine, leucine, isoleucine, alanine, methionine, or an amino acid residue which is covalently linked to another amino acid residue of the sequence
  MISC_FEATURE (24)..(24): Xaa is glycine, alanine, serine, or an amino acid residue which is covalently linked to another amino acid residue of the sequence
  MISC_FEATURE (25)..(25): Xaa is serine, glycine, alanine, threonine, or an amino acid residue which is covalently linked to another amino acid residue of the sequence
  MISC_FEATURE (26)..(26): Xaa is asparagine, glutamine, methionine, or an amino acid residue which is covalently linked to another amino acid residue of the sequence
  MISC_FEATURE (27)..(27): Xaa is lysine, arginine, or an amino acid residue which is covalently linked to another amino acid residue of the sequence
  MISC_FEATURE (28)..(28): Xaa is glycine, alanine, serine, or an amino acid residue which is covalently linked to another amino acid residue of the sequence
  MISC_FEATURE (29)..(29): Xaa is alanine, valine, glycine, serine, or an amino acid residue which is covalently linked to another amino acid residue of the sequence
  MISC_FEATURE (30)..(30): Xaa is isoleucine, leucine, valine, phenylalanine, methionine, or an amino acid residue which is covalently linked to another amino acid residue of the sequence
  MISC_FEATURE (31)..(31): Xaa is isoleucine, leucine, valine, phenylalanine, methionine, or an amino acid residue which is covalently linked to another amino acid residue of the sequence
  MISC_FEATURE (32)..(32): Xaa is glycine, alanine, serine, or an amino acid residue which is covalently linked to another amino acid residue of the sequence
  MISC_FEATURE (33)..(33): Xaa is leucine, isoleucine, valine, phenylalanine, methionine, or an amino acid residue which is covalently linked to another amino acid residue of the sequence
  MISC_FEATURE (34)..(34): Xaa is methionine, valine, leucine, isoleucine, alanine, or an amino acid residue which is covalently linked to another amino acid residue of the sequence
  MISC_FEATURE (35)..(35): Xaa is valine, leucine, isoleucine, alanine, methionine, or an amino acid residue which is covalently linked to another amino acid residue of the sequence
AEFRHDSGYEVHHXXXXXXAEDXXXXXXXXXXXXX

SEQ ID NO: 843 - protein, 34 aa, Artificial Sequence
  synthetic
  MISC_FEATURE (13)..(13): Xaa is glutamine, asparagine, methionine, serine, or an amino acid which is covalently linked to another amino acid residue of the sequence
  MISC_FEATURE (14)..(14): Xaa is lysine, arginine, or an amino acid residue which is covalently linked to another amino acid residue of the sequence
  MISC_FEATURE (15)..(15): Xaa is leucine, isoleucine, valine, phenylalanine, methionine, or an amino acid residue which is covalently linked to another amino acid residue of the sequence
  MISC_FEATURE (16)..(16): Xaa is valine, leucine, isoleucine, alanine, methionine, or an amino acid residue which is covalently linked to another amino acid residue of the sequence
  MISC_FEATURE (17)..(17): Xaa is phenylalanine, tyrosine, valine, leucine, isoleucine, methionine, or an amino acid residue which is covalently linked to another amino acid residue of the sequence
  MISC_FEATURE (18)..(18): Xaa is phenylalanine, tyrosine, valine, leucine, isoleucine, methionine, or an amino acid residue which is covalently linked to another amino acid residue of the sequence
  MISC_FEATURE (22)..(22): Xaa is valine, leucine, isoleucine, alanine, methionine, or an amino acid residue which is covalently linked to another amino acid residue of the sequence
  MISC_FEATURE (23)..(23): Xaa is glycine, alanine, serine, or an amino acid residue which is covalently linked to another amino acid residue of the sequence
  MISC_FEATURE (24)..(24): Xaa is serine, glycine, alanine, threonine, or an amino acid residue which is covalently linked to another amino acid residue of the sequence
  MISC_FEATURE (25)..(25): Xaa is asparagine, glutamine, methionine, or an amino acid residue which is covalently linked to another amino acid residue of the sequence
  MISC_FEATURE (26)..(26): Xaa is lysine, arginine, or an amino acid residue which is covalently linked to another amino acid residue of the sequence
  MISC_FEATURE (27)..(27): Xaa is glycine, alanine, serine, or an amino acid residue which is covalently linked to another amino acid residue of the sequence
  MISC_FEATURE (28)..(28): Xaa is alanine, valine, glycine, serine, or an amino acid residue which is covalently linked to another amino acid residue of the sequence
  MISC_FEATURE (29)..(29): Xaa is isoleucine, leucine, valine, phenylalanine, methionine, or an amino acid residue which is covalently linked to another amino acid residue of the sequence
  MISC_FEATURE (30)..(30): Xaa is isoleucine, leucine, valine, phenylalanine, methionine, or an amino acid residue which is covalently linked to another amino acid residue of the sequence
  MISC_FEATURE (31)..(31): Xaa is glycine, alanine, serine, or an amino acid residue which is covalently linked to another amino acid residue of the sequence
  MISC_FEATURE (32)..(32): Xaa is leucine, isoleucine, valine, phenylalanine, methionine, or an amino acid residue which is covalently linked to another amino acid residue of the sequence
  MISC_FEATURE (33)..(33): Xaa is methionine, valine, leucine, isoleucine, alanine, or an amino acid residue which is covalently linked to another amino acid residue of the sequence
  MISC_FEATURE (34)..(34): Xaa is valine, leucine, isoleucine, alanine, methionine, or an amino acid residue which is covalently linked to another amino acid residue of the sequence
EFRHDSGYEVHHXXXXXXAEDXXXXXXXXXXXXX

SEQ ID NO: 844 - protein, 33 aa, Artificial Sequence
  synthetic
  MISC_FEATURE (12)..(12): Xaa is glutamine, asparagine, methionine, serine, or an amino acid which is covalently linked to another amino acid residue of the sequence
  MISC_FEATURE (13)..(13): Xaa is lysine, arginine, or an amino acid residue which is covalently linked to another amino acid residue of the sequence
  MISC_FEATURE (14)..(14): Xaa is leucine, isoleucine, valine, phenylalanine, methionine, or an amino acid residue which is covalently linked to another amino acid residue of the sequence
  MISC_FEATURE (15)..(15): Xaa is valine, leucine, isoleucine, alanine, methionine, or an amino acid residue which is covalently linked to another amino acid residue of the sequence
  MISC_FEATURE (16)..(16): Xaa is phenylalanine, tyrosine, valine, leucine, isoleucine, methionine, or an amino acid residue which is covalently linked to another amino acid residue of the sequence
  MISC_FEATURE (17)..(17): Xaa is phenylalanine, tyrosine, valine, leucine, isoleucine, methionine, or an amino acid residue which is covalently linked to another amino acid residue of the sequence
  MISC_FEATURE (21)..(21): Xaa is valine, leucine, isoleucine, alanine, methionine, or an amino acid residue which is covalently linked to another amino acid residue of the sequence
  MISC_FEATURE (22)..(22): Xaa is glycine, alanine, serine, or an amino acid residue which is covalently linked to another amino acid residue of the sequence
  MISC_FEATURE (23)..(23): Xaa is serine, glycine, alanine, threonine, or an amino acid residue which is covalently linked to another amino acid residue of the sequence
  MISC_FEATURE (24)..(24): Xaa is asparagine, glutamine, methionine, or an amino acid residue which is covalently linked to another amino acid residue of the sequence
  MISC_FEATURE (25)..(25): Xaa is lysine, arginine, or an amino acid residue which is covalently linked to another amino acid residue of the sequence
  MISC_FEATURE (26)..(26): Xaa is glycine, alanine, serine, or an amino acid residue which is covalently linked to another amino acid residue of the sequence
  MISC_FEATURE (27)..(27): Xaa is alanine, valine, glycine, serine, or an amino acid residue which is covalently linked to another amino acid residue of the sequence
  MISC_FEATURE (28)..(28): Xaa is isoleucine, leucine, valine, phenylalanine, methionine, or an amino acid residue which is covalently linked to another amino acid residue of the sequence
  MISC_FEATURE (29)..(29): Xaa is isoleucine, leucine, valine, phenylalanine, methionine, or an amino acid residue which is covalently linked to another amino acid residue of the sequence
  MISC_FEATURE (30)..(30): Xaa is glycine, alanine, serine, or an amino acid residue which is covalently linked to another amino acid residue of the sequence
  MISC_FEATURE (31)..(31): Xaa is leucine, isoleucine, valine, phenylalanine, methionine, or an amino acid residue which is covalently linked to another amino acid residue of the sequence
  MISC_FEATURE (32)..(32): Xaa is methionine, valine, leucine, isoleucine, alanine, or an amino acid residue which is covalently linked to another amino acid residue of the sequence
  MISC_FEATURE (33)..(33): Xaa is valine, leucine, isoleucine, alanine, methionine, or an amino acid residue which is covalently linked to another amino acid residue of the sequence
FRHDSGYEVHHXXXXXXAEDXXXXXXXXXXXXX

SEQ ID NO: 845 - protein, 32 aa, Artificial Sequence
  synthetic
  MISC_FEATURE (11)..(11): Xaa is glutamine, asparagine, methionine, serine, or an amino acid which is covalently linked to another amino acid residue of the sequence
  MISC_FEATURE (12)..(12): Xaa is lysine, arginine, or an amino acid residue which is covalently linked to another amino acid residue of the sequence
  MISC_FEATURE (13)..(13): Xaa is leucine, isoleucine, valine, phenylalanine, methionine, or an amino acid residue which is covalently linked to another amino acid residue of the sequence
  MISC_FEATURE (14)..(14): Xaa is valine, leucine, isoleucine, alanine, methionine, or an amino acid residue which is covalently linked to another amino acid residue of the sequence
  MISC_FEATURE (15)..(15): Xaa is phenylalanine, tyrosine, valine, leucine, isoleucine, methionine, or an amino acid residue which is covalently linked to another amino acid residue of the sequence
  MISC_FEATURE (16)..(16): Xaa is phenylalanine, tyrosine, valine, leucine, isoleucine, methionine, or an amino acid residue which is covalently linked to another amino acid residue of the sequence
  MISC_FEATURE (20)..(20): Xaa is valine, leucine, isoleucine, alanine, methionine, or an amino acid residue which is covalently linked to another amino acid residue of the sequence
  MISC_FEATURE (21)..(21): Xaa is glycine, alanine, serine, or an amino acid residue which is covalently linked to another amino acid residue of the sequence
  MISC_FEATURE (22)..(22): Xaa is serine, glycine, alanine, threonine, or an amino acid residue which is covalently linked to another amino acid residue of the sequence
  MISC_FEATURE (23)..(23): Xaa is asparagine, glutamine, methionine, or an amino acid residue which is covalently linked to another amino acid residue of the sequence
  MISC_FEATURE (24)..(24): Xaa is lysine, arginine, or an amino acid residue which is covalently linked to another amino acid residue of the sequence
  MISC_FEATURE (25)..(25): Xaa is glycine, alanine, serine, or an amino acid residue which is covalently linked to another amino acid residue of the sequence
  MISC_FEATURE (26)..(26): Xaa is alanine, valine, glycine, serine, or an amino acid residue which is covalently linked to another amino acid residue of the sequence
  MISC_FEATURE (27)..(27): Xaa is isoleucine, leucine, valine, phenylalanine, methionine, or an amino acid residue which is covalently linked to another amino acid residue of the sequence
  MISC_FEATURE (28)..(28): Xaa is isoleucine, leucine, valine, phenylalanine, methionine, or an amino acid residue which is covalently linked to another amino acid residue of the sequence
  MISC_FEATURE (29)..(29): Xaa is glycine, alanine, serine, or an amino acid residue which is covalently linked to another amino acid residue of the sequence
  MISC_FEATURE (30)..(30): Xaa is leucine, isoleucine, valine, phenylalanine, methionine, or an amino acid residue which is covalently linked to another amino acid residue of the sequence
  MISC_FEATURE (31)..(31): Xaa is methionine, valine, leucine, isoleucine, alanine, or an amino acid residue which is covalently linked to another amino acid residue of the sequence
  MISC_FEATURE (32)..(32): Xaa is valine, leucine, isoleucine, alanine, methionine, or an amino acid residue which is covalently linked to another amino acid residue of the sequence
RHDSGYEVHHXXXXXXAEDXXXXXXXXXXXXX

SEQ ID NO: 846 - protein, 31 aa, Artificial Sequence
  synthetic
  MISC_FEATURE (10)..(10): Xaa is glutamine, asparagine, methionine, serine, or an amino acid which is covalently linked to another amino acid residue of the sequence
  MISC_FEATURE (11)..(11): Xaa is lysine, arginine, or an amino acid residue which is covalently linked to another amino acid residue of the sequence
  MISC_FEATURE (12)..(12): Xaa is leucine, isoleucine, valine, phenylalanine, methionine, or an amino acid residue which is covalently linked to another amino acid residue of the sequence
  MISC_FEATURE (13)..(13): Xaa is valine, leucine, isoleucine, alanine, methionine, or an amino acid residue which is covalently linked to another amino acid residue of the sequence
  MISC_FEATURE (14)..(14): Xaa is phenylalanine, tyrosine, valine, leucine, isoleucine, methionine, or an amino acid residue which is covalently linked to another amino acid residue of the sequence
  MISC_FEATURE (15)..(15): Xaa is phenylalanine, tyrosine, valine, leucine, isoleucine, methionine, or an amino acid residue which is covalently linked to another amino acid residue of the sequence
  MISC_FEATURE (19)..(19): Xaa is valine, leucine, isoleucine, alanine, methionine, or an amino acid residue which is covalently linked to another amino acid residue of the sequence
  MISC_FEATURE (20)..(20): Xaa is glycine, alanine, serine, or an amino acid residue which is covalently linked to another amino acid residue of the sequence
  MISC_FEATURE (21)..(21): Xaa is serine, glycine, alanine, threonine, or an amino acid residue which is covalently linked to another amino acid residue of the sequence
  MISC_FEATURE (22)..(22): Xaa is asparagine, glutamine, methionine, or an amino acid residue which is covalently linked to another amino acid residue of the sequence
  MISC_FEATURE (23)..(23): Xaa is lysine, arginine, or an amino acid residue which is covalently linked to another amino acid residue of the sequence
  MISC_FEATURE (24)..(24): Xaa is glycine, alanine, serine, or an amino acid residue which is covalently linked to another amino acid residue of the sequence
  MISC_FEATURE (25)..(25): Xaa is alanine, valine, glycine, serine, or an amino acid residue which is covalently linked to another amino acid residue of the sequence
  MISC_FEATURE (26)..(26): Xaa is isoleucine, leucine, valine, phenylalanine, methionine, or an amino acid residue which is covalently linked to another amino acid residue of the sequence
  MISC_FEATURE (27)..(27): Xaa is isoleucine, leucine, valine, phenylalanine, methionine, or an amino acid residue which is covalently linked to another amino acid residue of the sequence
  MISC_FEATURE (28)..(28): Xaa is glycine, alanine, serine, or an amino acid residue which is covalently linked to another amino acid residue of the sequence
  MISC_FEATURE (29)..(29): Xaa is leucine, isoleucine, valine, phenylalanine, methionine, or an amino acid residue which is covalently linked to another amino acid residue of the sequence
  MISC_FEATURE (30)..(30): Xaa is methionine, valine, leucine, isoleucine, alanine, or an amino acid residue which is covalently linked to another amino acid residue of the sequence
  MISC_FEATURE (31)..(31): Xaa is valine, leucine, isoleucine, alanine, methionine, or an amino acid residue which is covalently linked to another amino acid residue of the sequence
HDSGYEVHHXXXXXXAEDXXXXXXXXXXXXX

SEQ ID NO: 847 - protein, 30 aa, Artificial Sequence
  synthetic
  MISC_FEATURE (9)..(9): Xaa is glutamine, asparagine, methionine, serine, or an amino acid which is covalently linked to another amino acid residue of the sequence
  MISC_FEATURE (10)..(10): Xaa is lysine, arginine, or an amino acid residue which is covalently linked to another amino acid residue of the sequence
  MISC_FEATURE (11)..(11): Xaa is leucine, isoleucine, valine, phenylalanine, methionine, or an amino acid residue which is covalently linked to another amino acid residue of the sequence
  MISC_FEATURE (12)..(12): Xaa is valine, leucine, isoleucine, alanine, methionine, or an amino acid residue which is covalently linked to another amino acid residue of the sequence
  MISC_FEATURE (13)..(13): Xaa is phenylalanine, tyrosine, valine, leucine, isoleucine, methionine, or an amino acid residue which is covalently linked to another amino acid residue of the sequence
  MISC_FEATURE (14)..(14): Xaa is phenylalanine, tyrosine, valine, leucine, isoleucine, methionine, or an amino acid residue which is covalently linked to another amino acid residue of the sequence
  MISC_FEATURE (18)..(18): Xaa is valine, leucine, isoleucine, alanine, methionine, or an amino acid residue which is covalently linked to another amino acid residue of the sequence
  MISC_FEATURE (19)..(19): Xaa is glycine, alanine, serine, or an amino acid residue which is covalently linked to another amino acid residue of the sequence
  MISC_FEATURE (20)..(20): Xaa is serine, glycine, alanine, threonine, or an amino acid residue which is covalently linked to another amino acid residue of the sequence
  MISC_FEATURE (21)..(21): Xaa is asparagine, glutamine, methionine, or an amino acid residue which is covalently linked to another amino acid residue of the sequence
  MISC_FEATURE (22)..(22): Xaa is lysine, arginine, or an amino acid residue which is covalently linked to another amino acid residue of the sequence
  MISC_FEATURE (23)..(23): Xaa is glycine, alanine, serine, or an amino acid residue which is covalently linked to another amino acid residue of the sequence
  MISC_FEATURE (24)..(24): Xaa is alanine, valine, glycine, serine, or an amino acid residue which is covalently linked to another amino acid residue of the sequence
  MISC_FEATURE (25)..(25): Xaa is isoleucine, leucine, valine, phenylalanine, methionine, or an amino acid residue which is covalently linked to another amino acid residue of the sequence
  MISC_FEATURE (26)..(26): Xaa is isoleucine, leucine, valine, phenylalanine, methionine, or an amino acid residue which is covalently linked to another amino acid residue of the sequence
  MISC_FEATURE (27)..(27): Xaa is glycine, alanine, serine, or an amino acid residue which is covalently linked to another amino acid residue of the sequence
  MISC_FEATURE (28)..(28): Xaa is leucine, isoleucine, valine, phenylalanine, methionine, or an amino acid residue which is covalently linked to another amino acid residue of the sequence
  MISC_FEATURE (29)..(29): Xaa is methionine, valine, leucine, isoleucine, alanine, or an amino acid residue which is covalently linked to another amino acid residue of the sequence
  MISC_FEATURE (30)..(30): Xaa is valine, leucine, isoleucine, alanine, methionine, or an amino acid residue which is covalently linked to another amino acid residue of the sequence
DSGYEVHHXXXXXXAEDXXXXXXXXXXXXX

SEQ ID NO: 848 - protein, 29 aa, Artificial Sequence
  synthetic
  MISC_FEATURE (8)..(8): Xaa is glutamine, asparagine, methionine, serine, or an amino acid which is covalently linked to another amino acid residue of the sequence
  MISC_FEATURE (9)..(9): Xaa is lysine, arginine, or an amino acid residue which is covalently linked to another amino acid residue of the sequence
  MISC_FEATURE (10)..(10): Xaa is leucine, isoleucine, valine, phenylalanine, methionine, or an amino acid residue which is covalently linked to another amino acid residue of the sequence
  MISC_FEATURE (11)..(11): Xaa is valine, leucine, isoleucine, alanine, methionine, or an amino acid residue which is covalently linked to another amino acid residue of the sequence
  MISC_FEATURE (12)..(12): Xaa is phenylalanine, tyrosine, valine, leucine, isoleucine, methionine, or an amino acid residue which is covalently linked to another amino acid residue of the sequence
  MISC_FEATURE (13)..(13): Xaa is phenylalanine, tyrosine, valine, leucine, isoleucine, methionine, or an amino acid residue which is covalently linked to another amino acid residue of the sequence
  MISC_FEATURE (17)..(17): Xaa is valine, leucine, isoleucine, alanine, methionine, or an amino acid residue which is covalently linked to another amino acid residue of the sequence
  MISC_FEATURE (18)..(18): Xaa is glycine, alanine, serine, or an amino acid residue which is covalently linked to another amino acid residue of the sequence
  MISC_FEATURE (19)..(19): Xaa is serine, glycine, alanine, threonine, or an amino acid residue which is covalently linked to another amino acid residue of the sequence
  MISC_FEATURE (20)..(20): Xaa is asparagine, glutamine, methionine, or an amino acid residue which is covalently linked to another amino acid residue of the sequence
  MISC_FEATURE (21)..(21): Xaa is lysine, arginine, or an amino acid residue which is covalently linked to another amino acid residue of the sequence
  MISC_FEATURE (22)..(22): Xaa is glycine, alanine, serine, or an amino acid residue which is covalently linked to another amino acid residue of the sequence
  MISC_FEATURE (23)..(23): Xaa is alanine, valine, glycine, serine, or an amino acid residue which is covalently linked to another amino acid residue of the sequence
  MISC_FEATURE (24)..(24): Xaa is isoleucine, leucine, valine, phenylalanine, methionine, or an amino acid residue which is covalently linked to another amino acid residue of the sequence
  MISC_FEATURE (25)..(25): Xaa is isoleucine, leucine, valine, phenylalanine, methionine, or an amino acid residue which is covalently linked to another amino acid residue of the sequence
  MISC_FEATURE (26)..(26): Xaa is glycine, alanine, serine, or an amino acid residue which is covalently linked to another amino acid residue of the sequence
  MISC_FEATURE (27)..(27): Xaa is leucine, isoleucine, valine, phenylalanine, methionine, or an amino acid residue which is covalently linked to another amino acid residue of the sequence
  MISC_FEATURE (28)..(28): Xaa is methionine, valine, leucine, isoleucine, alanine, or an amino acid residue which is covalently linked to another amino acid residue of the sequence
  MISC_FEATURE (29)..(29): Xaa is valine, leucine, isoleucine, alanine, methionine, or an amino acid residue which is covalently linked to another amino acid residue of the sequence
SGYEVHHXXXXXXAEDXXXXXXXXXXXXX

SEQ ID NO: 849 - protein, 28 aa, Artificial Sequence
  synthetic
  MISC_FEATURE (7)..(7): Xaa is glutamine, asparagine, methionine, serine, or an amino acid which is covalently linked to another amino acid residue of the sequence
  MISC_FEATURE (8)..(8): Xaa is lysine, arginine, or an amino acid residue which is covalently linked to another amino acid residue of the sequence
  MISC_FEATURE (9)..(9): Xaa is leucine, isoleucine, valine, phenylalanine, methionine, or an amino acid residue which is covalently linked to another amino acid residue of the sequence
  MISC_FEATURE (10)..(10): Xaa is valine, leucine, isoleucine, alanine, methionine, or an amino acid residue which is covalently linked to another amino acid residue of the sequence
  MISC_FEATURE (11)..(11): Xaa is phenylalanine, tyrosine, valine, leucine, isoleucine, methionine, or an amino acid residue which is covalently linked to another amino acid residue of the sequence
  MISC_FEATURE (12)..(12): Xaa is phenylalanine, tyrosine, valine, leucine, isoleucine, methionine, or an amino acid residue which is covalently linked to another amino acid residue of the sequence
  MISC_FEATURE (16)..(16): Xaa is valine, leucine, isoleucine, alanine, methionine, or an amino acid residue which is covalently linked to another amino acid residue of the sequence
  MISC_FEATURE (17)..(17): Xaa is glycine, alanine, serine, or an amino acid residue which is covalently linked to another amino acid residue of the sequence
  MISC_FEATURE (18)..(18): Xaa is serine, glycine, alanine, threonine, or an amino acid residue which is covalently linked to another amino acid residue of the sequence
  MISC_FEATURE (19)..(19): Xaa is asparagine, glutamine, methionine, or an amino acid residue which is covalently linked to another amino acid residue of the sequence
  MISC_FEATURE (20)..(20): Xaa is lysine, arginine, or an amino acid residue which is covalently linked to another amino acid residue of the sequence
  MISC_FEATURE (21)..(21): Xaa is glycine, alanine, serine, or an amino acid residue which is covalently linked to another amino acid residue of the sequence
  MISC_FEATURE (22)..(22): Xaa is alanine, valine, glycine, serine, or an amino acid residue which is covalently linked to another amino acid residue of the sequence
  MISC_FEATURE (23)..(23): Xaa is isoleucine, leucine, valine, phenylalanine, methionine, or an amino acid residue which is covalently linked to another amino acid residue of the sequence
  MISC_FEATURE (24)..(24): Xaa is isoleucine, leucine, valine, phenylalanine, methionine, or an amino acid residue which is covalently linked to another amino acid residue of the sequence
  MISC_FEATURE (25)..(25): Xaa is glycine, alanine, serine, or an amino acid residue which is covalently linked to another amino acid residue of the sequence
  MISC_FEATURE (26)..(26): Xaa is leucine, isoleucine, valine, phenylalanine, methionine, or an amino acid residue which is covalently linked to another amino acid residue of the sequence
  MISC_FEATURE (27)..(27): Xaa is methionine, valine, leucine, isoleucine, alanine, or an amino acid residue which is covalently linked to another amino acid residue of the sequence
  MISC_FEATURE (28)..(28): Xaa is valine, leucine, isoleucine, alanine, methionine, or an amino acid residue which is covalently linked to another amino acid residue of the sequence
GYEVHHXXXXXXAEDXXXXXXXXXXXXX

SEQ ID NO: 850 - protein, 27 aa, Artificial Sequence
  synthetic
  MISC_FEATURE (6)..(6): Xaa is glutamine, asparagine, methionine, serine, or an amino acid which is covalently linked to another amino acid residue of the sequence
  MISC_FEATURE (7)..(7): Xaa is lysine, arginine, or an amino acid residue which is covalently linked to another amino acid residue of the sequence
  MISC_FEATURE (8)..(8): Xaa is leucine, isoleucine, valine, phenylalanine, methionine, or an amino acid residue which is covalently linked to another amino acid residue of the sequence
  MISC_FEATURE (9)..(9): Xaa is valine, leucine, isoleucine, alanine, methionine, or an amino acid residue which is covalently linked to another amino acid residue of the sequence
  MISC_FEATURE (10)..(10): Xaa is phenylalanine, tyrosine, valine, leucine, isoleucine, methionine, or an amino acid residue which is covalently linked to another amino acid residue of the sequence
  MISC_FEATURE (11)..(11): Xaa is phenylalanine, tyrosine, valine, leucine, isoleucine, methionine, or an amino acid residue which is covalently linked to another amino acid residue of the sequence
  MISC_FEATURE (15)..(15): Xaa is valine, leucine, isoleucine, alanine, methionine, or an amino acid residue which is covalently linked to another amino acid residue of the sequence
  MISC_FEATURE (16)..(16): Xaa is glycine, alanine, serine, or an amino acid residue which is covalently linked to another amino acid residue of the sequence
  MISC_FEATURE (17)..(17): Xaa is serine, glycine, alanine, threonine, or an amino acid residue which is covalently linked to another amino acid residue of the sequence
  MISC_FEATURE (18)..(18): Xaa is asparagine, glutamine, methionine, or an amino acid residue which is covalently linked to another amino acid residue of the sequence
  MISC_FEATURE (19)..(19): Xaa is lysine, arginine, or an amino acid residue which is covalently linked to another amino acid residue of the sequence
  MISC_FEATURE (20)..(20): Xaa is glycine, alanine, serine, or an amino acid residue which is covalently linked to another amino acid residue of the sequence
  MISC_FEATURE (21)..(21): Xaa is alanine, valine, glycine, serine, or an amino acid residue which is covalently linked to another amino acid residue of the sequence
  MISC_FEATURE (22)..(22): Xaa is isoleucine, leucine, valine, phenylalanine, methionine, or an amino acid residue which is covalently linked to another amino acid residue of the sequence
  MISC_FEATURE (23)..(23): Xaa is isoleucine, leucine, valine, phenylalanine, methionine, or an amino acid residue which is covalently linked to another amino acid residue of the sequence
  MISC_FEATURE (24)..(24): Xaa is glycine, alanine, serine, or an amino acid residue which is covalently linked to another amino acid residue of the sequence
  MISC_FEATURE (25)..(25): Xaa is leucine, isoleucine, valine, phenylalanine, methionine, or an amino acid residue which is covalently linked to another amino acid residue of the sequence
  MISC_FEATURE (26)..(26): Xaa is methionine, valine, leucine, isoleucine, alanine, or an amino acid residue which is covalently linked to another amino acid residue of the sequence
  MISC_FEATURE (27)..(27): Xaa is valine, leucine, isoleucine, alanine, methionine, or an amino acid residue which is covalently linked to another amino acid residue of the sequence
YEVHHXXXXXXAEDXXXXXXXXXXXXX

SEQ ID NO: 851 - protein, 26 aa, Artificial Sequence
  synthetic
  MISC_FEATURE (5)..(5): Xaa is glutamine, asparagine, methionine, serine, or an amino acid which is covalently linked to another amino acid residue of the sequence
  MISC_FEATURE (6)..(6): Xaa is lysine, arginine, or an amino acid residue which is covalently linked to another amino acid residue of the sequence
  MISC_FEATURE (7)..(7): Xaa is leucine, isoleucine, valine, phenylalanine, methionine, or an amino acid residue which is covalently linked to another amino acid residue of the sequence
  MISC_FEATURE (8)..(8): Xaa is valine, leucine, isoleucine, alanine, methionine, or an amino acid residue which is covalently linked to another amino acid residue of the sequence
  MISC_FEATURE (9)..(9): Xaa is phenylalanine, tyrosine, valine, leucine, isoleucine, methionine, or an amino acid residue which is covalently linked to another amino acid residue of the sequence
  MISC_FEATURE (10)..(10): Xaa is phenylalanine, tyrosine, valine, leucine, isoleucine, methionine, or an amino acid residue which is covalently linked to another amino acid residue of the sequence
  MISC_FEATURE (14)..(14): Xaa is valine, leucine, isoleucine, alanine, methionine, or an amino acid residue which is covalently linked to another amino acid residue of the sequence
  MISC_FEATURE (15)..(15): Xaa is glycine, alanine, serine, or an amino acid residue which is covalently linked to another amino acid residue of the sequence
  MISC_FEATURE (16)..(16): Xaa is serine, glycine, alanine, threonine, or an amino acid residue which is covalently linked to another amino acid residue of the sequence
  MISC_FEATURE (17)..(17): Xaa is asparagine, glutamine, methionine, or an amino acid residue which is covalently linked to another amino acid residue of the sequence
  MISC_FEATURE (18)..(18): Xaa is lysine, arginine, or an amino acid residue which is covalently linked to another amino acid residue of the sequence
  MISC_FEATURE (19)..(19): Xaa is glycine, alanine, serine, or an amino acid residue which is covalently linked to another amino acid residue of the sequence
  MISC_FEATURE (20)..(20): Xaa is alanine, valine, glycine, serine, or an amino acid residue which is covalently linked to another amino acid residue of the sequence
  MISC_FEATURE (21)..(21): Xaa is isoleucine, leucine, valine, phenylalanine, methionine, or an amino acid residue which is covalently linked to another amino acid residue of the sequence
  MISC_FEATURE (22)..(22): Xaa is isoleucine, leucine, valine, phenylalanine, methionine, or an amino acid residue which is covalently linked to another amino acid residue of the sequence
  MISC_FEATURE (23)..(23): Xaa is glycine, alanine, serine, or an amino acid residue which is covalently linked to another amino acid residue of the sequence
  MISC_FEATURE (24)..(24): Xaa is leucine, isoleucine, valine, phenylalanine, methionine, or an amino acid residue which is covalently linked to another amino acid residue of the sequence
  MISC_FEATURE (25)..(25): Xaa is methionine, valine, leucine, isoleucine, alanine, or an amino acid residue which is covalently linked to another amino acid residue of the sequence
  MISC_FEATURE (26)..(26): Xaa is valine, leucine, isoleucine, alanine, methionine, or an amino acid residue which is covalently linked to another amino acid residue of the sequence
EVHHXXXXXXAEDXXXXXXXXXXXXX

SEQ ID NO: 852 - protein, 25 aa, Artificial Sequence
  synthetic
  MISC_FEATURE (4)..(4): Xaa is glutamine, asparagine, methionine, serine, or an amino acid which is covalently linked to another amino acid residue of the sequence
  MISC_FEATURE (5)..(5): Xaa is lysine, arginine, or an amino acid residue which is covalently linked to another amino acid residue of the sequence
  MISC_FEATURE (6)..(6): Xaa is leucine, isoleucine, valine, phenylalanine, methionine, or an amino acid residue which is covalently linked to another amino acid residue of the sequence
  MISC_FEATURE (7)..(7): Xaa is valine, leucine, isoleucine, alanine, methionine, or an amino acid residue which is covalently linked to another amino acid residue of the sequence
  MISC_FEATURE (8)..(8): Xaa is phenylalanine, tyrosine, valine, leucine, isoleucine, methionine, or an amino acid residue which is covalently linked to another amino acid residue of the sequence
  MISC_FEATURE (9)..(9): Xaa is phenylalanine, tyrosine, valine, leucine, isoleucine, methionine, or an amino acid residue which is covalently linked to another amino acid residue of the sequence
  MISC_FEATURE (13)..(13): Xaa is valine, leucine, isoleucine, alanine, methionine, or an amino acid residue which is covalently linked to another amino acid residue of the sequence
  MISC_FEATURE (14)..(14): Xaa is glycine, alanine, serine, or an amino acid residue which is covalently linked to another amino acid residue of the sequence
  MISC_FEATURE (15)..(15): Xaa is serine, glycine, alanine, threonine, or an amino acid residue which is covalently linked to another amino acid residue of the sequence
  MISC_FEATURE (16)..(16): Xaa is asparagine, glutamine, methionine, or an amino acid residue which is covalently linked to another amino acid residue of the sequence
  MISC_FEATURE (17)..(17): Xaa is lysine, arginine, or an amino acid residue which is covalently linked to another amino acid residue of the sequence
  MISC_FEATURE (18)..(18): Xaa is glycine, alanine, serine, or an amino acid residue which is covalently linked to another amino acid residue of the sequence
  MISC_FEATURE (19)..(19): Xaa is alanine, valine, glycine, serine, or an amino acid residue which is covalently linked to another amino acid residue of the sequence
  MISC_FEATURE (20)..(20): Xaa is isoleucine, leucine, valine, phenylalanine, methionine, or an amino acid residue which is covalently linked to another amino acid residue of the sequence
  MISC_FEATURE (21)..(21): Xaa is isoleucine, leucine, valine, phenylalanine, methionine, or an amino acid residue which is covalently linked to another amino acid residue of the sequence
  MISC_FEATURE (22)..(22): Xaa is glycine, alanine, serine, or an amino acid residue which is covalently linked to another amino acid residue of the sequence
  MISC_FEATURE (23)..(23): Xaa is leucine, isoleucine, valine, phenylalanine, methionine, or an amino acid residue which is covalently linked to another amino acid residue of the sequence
  MISC_FEATURE (24)..(24): Xaa is methionine, valine, leucine, isoleucine, alanine, or an amino acid residue which is covalently linked to another amino acid residue of the sequence
  MISC_FEATURE (25)..(25): Xaa is valine, leucine, isoleucine, alanine, methionine, or an amino acid residue which is covalently linked to another amino acid residue of the sequence
VHHXXXXXXAEDXXXXXXXXXXXXX

SEQ ID NO: 853 - protein, 24 aa, Artificial Sequence
  synthetic
  MISC_FEATURE (3)..(3): Xaa is glutamine, asparagine, methionine, serine, or an amino acid which is covalently linked to another amino acid residue of the sequence
  MISC_FEATURE (4)..(4): Xaa is lysine, arginine, or an amino acid residue which is covalently linked to another amino acid residue of the sequence
  MISC_FEATURE (5)..(5): Xaa is leucine, isoleucine, valine, phenylalanine, methionine, or an amino acid residue which is covalently linked to another amino acid residue of the sequence
  MISC_FEATURE (6)..(6): Xaa is valine, leucine, isoleucine, alanine, methionine, or an amino acid residue which is covalently linked to another amino acid residue of the sequence
  MISC_FEATURE (7)..(7): Xaa is phenylalanine, tyrosine, valine, leucine, isoleucine, methionine, or an amino acid residue which is covalently linked to another amino acid residue of the sequence
  MISC_FEATURE (8)..(8): Xaa is phenylalanine, tyrosine, valine, leucine, isoleucine, methionine, or an amino acid residue which is covalently linked to another amino acid residue of the sequence
  MISC_FEATURE (12)..(12): Xaa is valine, leucine, isoleucine, alanine, methionine, or an amino acid residue which is covalently linked to another amino acid residue of the sequence
  MISC_FEATURE (13)..(13): Xaa is glycine, alanine, serine, or an amino acid residue which is covalently linked to another amino acid residue of the sequence
  MISC_FEATURE (14)..(14): Xaa is serine, glycine, alanine, threonine, or an amino acid residue which is covalently linked to another amino acid residue of the sequence
  MISC_FEATURE (15)..(15): Xaa is asparagine, glutamine, methionine, or an amino acid residue which is covalently linked to another amino acid residue of the sequence
  MISC_FEATURE (16)..(16): Xaa is lysine, arginine, or an amino acid residue which is covalently linked to another amino acid residue of the sequence
  MISC_FEATURE (17)..(17): Xaa is glycine, alanine, serine, or an amino acid residue which is covalently linked to another amino acid residue of the sequence
  MISC_FEATURE (18)..(18): Xaa is alanine, valine, glycine, serine, or an amino acid residue which is covalently linked to another amino acid residue of the sequence
  MISC_FEATURE (19)..(19): Xaa is isoleucine, leucine, valine, phenylalanine, methionine, or an amino acid residue which is covalently linked to another amino acid residue of the sequence
  MISC_FEATURE (20)..(20): Xaa is isoleucine, leucine, valine, phenylalanine, methionine, or an amino acid residue which is covalently linked to another amino acid residue of the sequence
  MISC_FEATURE (21)..(21): Xaa is glycine, alanine, serine, or an amino acid residue which is covalently linked to another amino acid residue of the sequence
  MISC_FEATURE (22)..(22): Xaa is leucine, isoleucine, valine, phenylalanine, methionine, or an amino acid residue which is covalently linked to another amino acid residue of the sequence
  MISC_FEATURE (23)..(23): Xaa is methionine, valine, leucine, isoleucine, alanine, or an amino acid residue which is covalently linked to another amino acid residue of the sequence
  MISC_FEATURE (24)..(24): Xaa is valine, leucine, isoleucine, alanine, methionine, or an amino acid residue which is covalently linked to another amino acid residue of the sequence
HHXXXXXXAEDXXXXXXXXXXXXX

SEQ ID NO: 854 - protein, 23 aa, Artificial Sequence
  synthetic
  MISC_FEATURE (2)..(2): Xaa is glutamine, asparagine, methionine, serine, or an amino acid which is covalently linked to another amino acid residue of the sequence
  MISC_FEATURE (3)..(3): Xaa is lysine, arginine, or an amino acid residue which is covalently linked to another amino acid residue of the sequence
  MISC_FEATURE (4)..(4): Xaa is leucine, isoleucine, valine, phenylalanine, methionine, or an amino acid residue which is covalently linked to another amino acid residue of the sequence
  MISC_FEATURE (5)..(5): Xaa is valine, leucine, isoleucine, alanine, methionine, or an amino acid residue which is covalently linked to another amino acid residue of the sequence
  MISC_FEATURE (6)..(6): Xaa is phenylalanine, tyrosine, valine, leucine, isoleucine, methionine, or an amino acid residue which is covalently linked to another amino acid residue of the sequence
  MISC_FEATURE (7)..(7): Xaa is phenylalanine, tyrosine, valine, leucine, isoleucine, methionine, or an amino acid residue which is covalently linked to another amino acid residue of the sequence
  MISC_FEATURE (11)..(11): Xaa is valine, leucine, isoleucine, alanine, methionine, or an amino acid residue which is covalently linked to another amino acid residue of the sequence
  MISC_FEATURE (12)..(12): Xaa is glycine, alanine, serine, or an amino acid residue which is covalently linked to another amino acid residue of the sequence
  MISC_FEATURE (13)..(13): Xaa is serine, glycine, alanine, threonine, or an amino acid residue which is covalently linked to another amino acid residue of the sequence
  MISC_FEATURE (14)..(14): Xaa is asparagine, glutamine, methionine, or an amino acid residue which is covalently linked to another amino acid residue of the sequence
  MISC_FEATURE (15)..(15): Xaa is lysine, arginine, or an amino acid residue which is covalently linked to another amino acid residue of the sequence
  MISC_FEATURE (16)..(16): Xaa is glycine, alanine, serine, or an amino acid residue which is covalently linked to another amino acid residue of the sequence
  MISC_FEATURE (17)..(17): Xaa is alanine, valine, glycine, serine, or an amino acid residue which is covalently linked to another amino acid residue of the sequence
  MISC_FEATURE (18)..(18): Xaa is isoleucine, leucine, valine, phenylalanine, methionine, or an amino acid residue which is covalently linked to another amino acid residue of the sequence
  MISC_FEATURE (19)..(19): Xaa is isoleucine, leucine, valine, phenylalanine, methionine, or an amino acid residue which is covalently linked to another amino acid residue of the sequence
  MISC_FEATURE (20)..(20): Xaa is glycine, alanine, serine, or an amino acid residue which is covalently linked to another amino acid residue of the sequence
  MISC_FEATURE (21)..(21): Xaa is leucine, isoleucine, valine, phenylalanine, methionine, or an amino acid residue which is covalently linked to another amino acid residue of the sequence
  MISC_FEATURE (22)..(22): Xaa is methionine, valine, leucine, isoleucine, alanine, or an amino acid residue which is covalently linked to another amino acid residue of the sequence
  MISC_FEATURE (23)..(23): Xaa is valine, leucine, isoleucine, alanine, methionine, or an amino acid residue which is covalently linked to another amino acid residue of the sequence
HXXXXXXAEDXXXXXXXXXXXXX

SEQ ID NO: 855 - protein, 22 aa, Artificial Sequence
  synthetic
  MISC_FEATURE (1)..(1): Xaa is glutamine, asparagine, methionine, serine, or an amino acid which is covalently linked to another amino acid residue of the sequence
  MISC_FEATURE (2)..(2): Xaa is lysine, arginine, or an amino acid residue which is covalently linked to another amino acid residue of the sequence
  MISC_FEATURE (3)..(3): Xaa is leucine, isoleucine, valine, phenylalanine, methionine, or an amino acid residue which is covalently linked to another amino acid residue of the sequence
  MISC_FEATURE (4)..(4): Xaa is valine, leucine, isoleucine, alanine, methionine, or an amino acid residue which is covalently linked to another amino acid residue of the sequence
  MISC_FEATURE (5)..(5): Xaa is phenylalanine, tyrosine, valine, leucine, isoleucine, methionine, or an amino acid residue which is covalently linked to another amino acid residue of the sequence
  MISC_FEATURE (6)..(6): Xaa is phenylalanine, tyrosine, valine, leucine, isoleucine, methionine, or an amino acid residue which is covalently linked to another amino acid residue of the sequence
  MISC_FEATURE (10)..(10): Xaa is valine, leucine, isoleucine, alanine, methionine, or an amino acid residue which is covalently linked to another amino acid residue of the sequence
  MISC_FEATURE (11)..(11): Xaa is glycine, alanine, serine, or an amino acid residue which is covalently linked to another amino acid residue of the sequence
  MISC_FEATURE (12)..(12): Xaa is serine, glycine, alanine, threonine, or an amino acid residue which is covalently linked to another amino acid residue of the sequence
  MISC_FEATURE (13)..(13): Xaa is asparagine, glutamine, methionine, or an amino acid residue which is covalently linked to another amino acid residue of the sequence
  MISC_FEATURE (14)..(14): Xaa is lysine, arginine, or an amino acid residue which is covalently linked to another amino acid residue of the sequence
  MISC_FEATURE (15)..(15): Xaa is glycine, alanine, serine, or an amino acid residue which is covalently linked to another amino acid residue of the sequence
  MISC_FEATURE (16)..(16): Xaa is alanine, valine, glycine, serine, or an amino acid residue which is covalently linked to another amino acid residue of the sequence
  MISC_FEATURE (17)..(17): Xaa is isoleucine, leucine, valine, phenylalanine, methionine, or an amino acid residue which is covalently linked to another amino acid residue of the sequence
  MISC_FEATURE (18)..(18): Xaa is isoleucine, leucine, valine, phenylalanine, methionine, or an amino acid residue which is covalently linked to another amino acid residue of the sequence
  MISC_FEATURE (19)..(19): Xaa is glycine, alanine, serine, or an amino acid residue which is covalently linked to another amino acid residue of the sequence
  MISC_FEATURE (20)..(20): Xaa is leucine, isoleucine, valine, phenylalanine, methionine, or an amino acid residue which is covalently linked to another amino acid residue of the sequence
  MISC_FEATURE (21)..(21): Xaa is methionine, valine, leucine, isoleucine, alanine, or an amino acid residue which is covalently linked to another amino acid residue of the sequence
  MISC_FEATURE (22)..(22): Xaa is valine, leucine, isoleucine, alanine, methionine, or an amino acid residue which is covalently linked to another amino acid residue of the sequence
XXXXXXAEDXXXXXXXXXXXXX

SEQ ID NO: 856 - protein, 21 aa, Artificial Sequence
  synthetic
  MISC_FEATURE (1)..(1): Xaa is lysine, arginine, or an amino acid residue which is covalently linked to another amino acid residue of the sequence
  MISC_FEATURE (2)..(2): Xaa is leucine, isoleucine, valine, phenylalanine, methionine, or an amino acid residue which is covalently linked to another amino acid residue of the sequence
  MISC_FEATURE (3)..(3): Xaa is valine, leucine, isoleucine, alanine, methionine, or an amino acid residue which is covalently linked to another amino acid residue of the sequence
  MISC_FEATURE (4)..(4): Xaa is phenylalanine, tyrosine, valine, leucine, isoleucine, methionine, or an amino acid residue which is covalently linked to another amino acid residue of the sequence
  MISC_FEATURE (5)..(5): Xaa is phenylalanine, tyrosine, valine, leucine, isoleucine, methionine, or an amino acid residue which is covalently linked to another amino acid residue of the sequence
  MISC_FEATURE (9)..(9): Xaa is valine, leucine, isoleucine, alanine, methionine, or an amino acid residue which is covalently linked to another amino acid residue of the sequence
  MISC_FEATURE (10)..(10): Xaa is glycine, alanine, serine, or an amino acid residue which is covalently linked to another amino acid residue of the sequence
  MISC_FEATURE (11)..(11): Xaa is serine, glycine, alanine, threonine, or an amino acid residue which is covalently linked to another amino acid residue of the sequence
  MISC_FEATURE (12)..(12): Xaa is asparagine, glutamine, methionine, or an amino acid residue which is covalently linked to another amino acid residue of the sequence
  MISC_FEATURE (13)..(13): Xaa is lysine, arginine, or an amino acid residue which is covalently linked to another amino acid residue of the sequence
  MISC_FEATURE (14)..(14): Xaa is glycine, alanine, serine, or an amino acid residue which is covalently linked to another amino acid residue of the sequence
  MISC_FEATURE (15)..(15): Xaa is alanine, valine, glycine, serine, or an amino acid residue which is covalently linked to another amino acid residue of the sequence
  MISC_FEATURE (16)..(16): Xaa is isoleucine, leucine, valine, phenylalanine, methionine, or an amino acid residue which is covalently linked to another amino acid residue of the sequence
  MISC_FEATURE (17)..(17): Xaa is isoleucine, leucine, valine, phenylalanine, methionine, or an amino acid residue which is covalently linked to another amino acid residue of the sequence
  MISC_FEATURE (18)..(18): Xaa is glycine, alanine, serine, or an amino acid residue which is covalently linked to another amino acid residue of the sequence
  MISC_FEATURE (19)..(19): Xaa is leucine, isoleucine, valine, phenylalanine, methionine, or an amino acid residue which is covalently linked to another amino acid residue of the sequence
  MISC_FEATURE (20)..(20): Xaa is methionine, valine, leucine, isoleucine, alanine, or an amino acid residue which is covalently linked to another amino acid residue of the sequence
XXXXXAEDXXXXXXXXXXXXV

SEQ ID NO: 857 - protein, 20 aa, Artificial Sequence
  synthetic
  MISC_FEATURE (1)..(1): Xaa is leucine, isoleucine, valine, phenylalanine, methionine, or an amino acid residue which is covalently linked to another amino acid residue of the sequence
  MISC_FEATURE (2)..(2): Xaa is valine, leucine, isoleucine, alanine, methionine, or an amino acid residue which is covalently linked to another amino acid residue of the sequence
  MISC_FEATURE (3)..(3): Xaa is phenylalanine, tyrosine, valine, leucine, isoleucine, methionine, or an amino acid residue which is covalently linked to another amino acid residue of the sequence
  MISC_FEATURE (4)..(4): Xaa is phenylalanine, tyrosine, valine, leucine, isoleucine, methionine, or an amino acid residue which is covalently linked to another amino acid residue of the sequence
  MISC_FEATURE (8)..(8): Xaa is valine, leucine, isoleucine, alanine, methionine, or an amino acid residue which is covalently linked to another amino acid residue of the sequence
  MISC_FEATURE (9)..(9): Xaa is glycine, alanine, serine, or an amino acid residue which is covalently linked to another amino acid residue of the sequence
  MISC_FEATURE (10)..(10): Xaa is serine, glycine, alanine, threonine, or an amino acid residue which is covalently linked to another amino acid residue of the sequence
  MISC_FEATURE (11)..(11): Xaa is asparagine, glutamine, methionine, or an amino acid residue which is covalently linked to another amino acid residue of the sequence
  MISC_FEATURE (12)..(12): Xaa is lysine, arginine, or an amino acid residue which is covalently linked to another amino acid residue of the sequence
  MISC_FEATURE (13)..(13): Xaa is glycine, alanine, serine, or an amino acid residue which is covalently linked to another amino acid residue of the sequence
  MISC_FEATURE (14)..(14): Xaa is alanine, valine, glycine, serine, or an amino acid residue which is covalently linked to another amino acid residue of the sequence
  MISC_FEATURE (15)..(15): Xaa is isoleucine, leucine, valine, phenylalanine, methionine, or an amino acid residue which is covalently linked to another amino acid residue of the sequence
  MISC_FEATURE (16)..(16): Xaa is isoleucine, leucine, valine, phenylalanine, methionine, or an amino acid residue which is covalently linked to another amino acid residue of the sequence
  MISC_FEATURE (17)..(17): Xaa is glycine, alanine, serine, or an amino acid residue which is covalently linked to another amino acid residue of the sequence
  MISC_FEATURE (18)..(18): Xaa is leucine, isoleucine, valine, phenylalanine, methionine, or an amino acid residue which is covalently linked to another amino acid residue of the sequence
XXXXAEDXXXXXXXXXXXMV

SEQ ID NO: 858 - protein, 19 aa, Artificial Sequence
  synthetic
  MISC_FEATURE (1)..(1): Xaa is valine, leucine, isoleucine, alanine, methionine, or an amino acid residue which is covalently linked to another amino acid residue of the sequence
  MISC_FEATURE (2)..(2): Xaa is phenylalanine, tyrosine, valine, leucine, isoleucine, methionine, or an amino acid residue which is covalently linked to another amino acid residue of the sequence
  MISC_FEATURE (3)..(3): Xaa is phenylalanine, tyrosine, valine, leucine, isoleucine, methionine, or an amino acid residue which is covalently linked to another amino acid residue of the sequence
  MISC_FEATURE (7)..(7): Xaa is valine, leucine, isoleucine, alanine, methionine, or an amino acid residue which is covalently linked to another amino acid residue of the sequence
  MISC_FEATURE (8)..(8): Xaa is glycine, alanine, serine, or an amino acid residue which is covalently linked to another amino acid residue of the sequence
  MISC_FEATURE (9)..(9): Xaa is serine, glycine, alanine, threonine, or an amino acid residue which is covalently linked to another amino acid residue of the sequence
  MISC_FEATURE (10)..(10): Xaa is asparagine, glutamine, methionine, or an amino acid residue which is covalently linked to another amino acid residue of the sequence
  MISC_FEATURE (11)..(11): Xaa is lysine, arginine, or an amino acid residue which is covalently linked to another amino acid residue of the sequence
  MISC_FEATURE (12)..(12): Xaa is glycine, alanine, serine, or an amino acid residue which is covalently linked to another amino acid residue of the sequence
  MISC_FEATURE (13)..(13): Xaa is alanine, valine, glycine, serine, or an amino acid residue which is covalently linked to another amino acid residue of the sequence
  MISC_FEATURE (14)..(14): Xaa is isoleucine, leucine, valine, phenylalanine, methionine, or an amino acid residue which is covalently linked to another amino acid residue of the sequence
  MISC_FEATURE (15)..(15): Xaa is isoleucine, leucine, valine, phenylalanine, methionine, or an amino acid residue which is covalently linked to another amino acid residue of the sequence
  MISC_FEATURE (16)..(16): Xaa is glycine, alanine, serine, or an amino acid residue which is covalently linked to another amino acid residue of the sequence
XXXAEDXXXXXXXXXXLMV

SEQ ID NO: 859 - protein, 18 aa, Artificial Sequence
  synthetic
  MISC_FEATURE (1)..(1): Xaa is phenylalanine, tyrosine, valine, leucine, isoleucine, methionine, or an amino acid residue which is covalently linked to another amino acid residue of the sequence
  MISC_FEATURE (2)..(2): Xaa is phenylalanine, tyrosine, valine, leucine, isoleucine, methionine, or an amino acid residue which is covalently linked to another amino acid residue of the sequence
  MISC_FEATURE (6)..(6): Xaa is valine, leucine, isoleucine, alanine, methionine, or an amino acid residue which is covalently linked to another amino acid residue of the sequence
  MISC_FEATURE (7)..(7): Xaa is glycine, alanine, serine, or an amino acid residue which is covalently linked to another amino acid residue of the sequence
  MISC_FEATURE (8)..(8): Xaa is serine, glycine, alanine, threonine, or an amino acid residue which is covalently linked to another amino acid residue of the sequence
  MISC_FEATURE (9)..(9): Xaa is asparagine, glutamine, methionine, or an amino acid residue which is covalently linked to another amino acid residue of the sequence
  MISC_FEATURE (10)..(10): Xaa is lysine, arginine, or an amino acid residue which is covalently linked to another amino acid residue of the sequence
  MISC_FEATURE (11)..(11): Xaa is glycine, alanine, serine, or an amino acid residue which is covalently linked to another amino acid residue of the sequence
  MISC_FEATURE (12)..(12): Xaa is alanine, valine, glycine, serine, or an amino acid residue which is covalently linked to another amino acid residue of the sequence
  MISC_FEATURE (13)..(13): Xaa is isoleucine, leucine, valine, phenylalanine, methionine, or an amino acid residue which is covalently linked to another amino acid residue of the sequence
  MISC_FEATURE (14)..(14): Xaa is isoleucine, leucine, valine, phenylalanine, methionine, or an amino acid residue which is covalently linked to another amino acid residue of the sequence
XXAEDXXXXXXXXXGLMV

SEQ ID NO: 860 - protein, 17 aa, Artificial Sequence
  synthetic
  MISC_FEATURE (1)..(1): Xaa is phenylalanine, tyrosine, valine, leucine, isoleucine, methionine, or an amino acid residue which is covalently linked to another amino acid residue of the sequence
  MISC_FEATURE (5)..(5): Xaa is valine, leucine, isoleucine, alanine, methionine, or an amino acid residue which is covalently linked to another amino acid residue of the sequence
  MISC_FEATURE (6)..(6): Xaa is glycine, alanine, serine, or an amino acid residue which is covalently linked to another amino acid residue of the sequence
  MISC_FEATURE (7)..(7): Xaa is serine, glycine, alanine, threonine, or an amino acid residue which is covalently linked to another amino acid residue of the sequence
  MISC_FEATURE (8)..(8): Xaa is asparagine, glutamine, methionine, or an amino acid residue which is covalently linked to another amino acid residue of the sequence
  MISC_FEATURE (9)..(9): Xaa is lysine, arginine, or an amino acid residue which is covalently linked to another amino acid residue of the sequence
  MISC_FEATURE (10)..(10): Xaa is glycine, alanine, serine, or an amino acid residue which is covalently linked to another amino acid residue of the sequence
  MISC_FEATURE (11)..(11): Xaa is alanine, valine, glycine, serine, or an amino acid residue which is covalently linked to another amino acid residue of the sequence
  MISC_FEATURE (12)..(12): Xaa is isoleucine, leucine, valine, phenylalanine, methionine, or an amino acid residue which is covalently linked to another amino acid residue of the sequence
XAEDXXXXXXXXIGLMV

SEQ ID NO: 861 - protein, 35 aa, Artificial Sequence
  synthetic
  MISC_FEATURE (16)..(16): Xaa is lysine, arginine, or an amino acid residue which is covalently linked to another amino acid residue of the sequence
  MISC_FEATURE (17)..(17): Xaa is leucine, isoleucine, valine, phenylalanine, methionine, or an amino acid residue which is covalently linked to another amino acid residue of the sequence
  MISC_FEATURE (18)..(18): Xaa is valine, leucine, isoleucine, alanine, methionine, or an amino acid residue which is covalently linked to another amino acid residue of the sequence
  MISC_FEATURE (19)..(19): Xaa is phenylalanine, tyrosine, valine, leucine, isoleucine, methionine, or an amino acid residue which is covalently linked to another amino acid residue of the sequence
  MISC_FEATURE (20)..(20): Xaa is phenylalanine, tyrosine, valine, leucine, isoleucine, methionine, or an amino acid residue which is covalently linked to another amino acid residue of the sequence
  MISC_FEATURE (24)..(24): Xaa is valine, leucine, isoleucine, alanine, methionine, or an amino acid residue which is covalently linked to another amino acid residue of the sequence
  MISC_FEATURE (25)..(25): Xaa is glycine, alanine, serine, or an amino acid residue which is covalently linked to another amino acid residue of the sequence
  MISC_FEATURE (26)..(26): Xaa is serine, glycine, alanine, threonine, or an amino acid residue which is covalently linked to another amino acid residue of the sequence
  MISC_FEATURE (27)..(27): Xaa is asparagine, glutamine, methionine, or an amino acid residue which is covalently linked to another amino acid residue of the sequence
  MISC_FEATURE (28)..(28): Xaa is lysine, arginine, or an amino acid residue which is covalently linked to another amino acid residue of the sequence
  MISC_FEATURE (29)..(29): Xaa is glycine, alanine, serine, or an amino acid residue which is covalently linked to another amino acid residue of the sequence
  MISC_FEATURE (30)..(30): Xaa is alanine, valine, glycine, serine, or an amino acid residue which is covalently linked to another amino acid residue of the sequence
  MISC_FEATURE (31)..(31): Xaa is isoleucine, leucine, valine, phenylalanine, methionine, or an amino acid residue which is covalently linked to another amino acid residue of the sequence
  MISC_FEATURE (32)..(32): Xaa is isoleucine, leucine, valine, phenylalanine, methionine, or an amino acid residue which is covalently linked to another amino acid residue of the sequence
  MISC_FEATURE (33)..(33): Xaa is glycine, alanine, serine, or an amino acid residue which is covalently linked to another amino acid residue of the sequence
  MISC_FEATURE (34)..(34): Xaa is leucine, isoleucine, valine, phenylalanine, methionine, or an amino acid residue which is covalently linked to another amino acid residue of the sequence
  MISC_FEATURE (35)..(35): Xaa is methionine, valine, leucine, isoleucine, alanine, or an amino acid residue which is covalently linked to another amino acid residue of the sequence
DAEFRHDSGYEVHHQXXXXXAEDXXXXXXXXXXXX

SEQ ID NO: 862 - protein, 34 aa, Artificial Sequence
  synthetic
  MISC_FEATURE (15)..(15): Xaa is lysine, arginine, or an amino acid residue which is covalently linked to another amino acid residue of the sequence
  MISC_FEATURE (16)..(16): Xaa is leucine, isoleucine, valine, phenylalanine, methionine, or an amino acid residue which is covalently linked to another amino acid residue of the sequence
  MISC_FEATURE (17)..(17): Xaa is valine, leucine, isoleucine, alanine, methionine, or an amino acid residue which is covalently linked to another amino acid residue of the sequence
  MISC_FEATURE (18)..(18): Xaa is phenylalanine, tyrosine, valine, leucine, isoleucine, methionine, or an amino acid residue which is covalently linked to another amino acid residue of the sequence
  MISC_FEATURE (19)..(19): Xaa is phenylalanine, tyrosine, valine, leucine, isoleucine, methionine, or an amino acid residue which is covalently linked to another amino acid residue of the sequence
  MISC_FEATURE (23)..(23): Xaa is valine, leucine, isoleucine, alanine, methionine, or an amino acid residue which is covalently linked to another amino acid residue of the sequence
  MISC_FEATURE (24)..(24): Xaa is glycine, alanine, serine, or an amino acid residue which is covalently linked to another amino acid residue of the sequence
  MISC_FEATURE (25)..(25): Xaa is serine, glycine, alanine, threonine, or an amino acid residue which is covalently linked to another amino acid residue of the sequence
  MISC_FEATURE (26)..(26): Xaa is asparagine, glutamine, methionine, or an amino acid residue which is covalently linked to another amino acid residue of the sequence
  MISC_FEATURE (27)..(27): Xaa is lysine, arginine, or an amino acid residue which is covalently linked to another amino acid residue of the sequence
  MISC_FEATURE (28)..(28): Xaa is glycine, alanine, serine, or an amino acid residue which is covalently linked to another amino acid residue of the sequence
  MISC_FEATURE (29)..(29): Xaa is alanine, valine, glycine, serine, or an amino acid residue which is covalently linked to another amino acid residue of the sequence
  MISC_FEATURE (30)..(30): Xaa is isoleucine, leucine, valine, phenylalanine, methionine, or an amino acid residue which is covalently linked to another amino acid residue of the sequence
  MISC_FEATURE (31)..(31): Xaa is isoleucine, leucine, valine, phenylalanine, methionine, or an amino acid residue which is covalently linked to another amino acid residue of the sequence
  MISC_FEATURE (32)..(32): Xaa is glycine, alanine, serine, or an amino acid residue which is covalently linked to another amino acid residue of the sequence
  MISC_FEATURE (33)..(33): Xaa is leucine, isoleucine, valine, phenylalanine, methionine, or an amino acid residue which is covalently linked to another amino acid residue of the sequence
  MISC_FEATURE (34)..(34): Xaa is methionine, valine, leucine, isoleucine, alanine, or an amino acid residue which is covalently linked to another amino acid residue of the sequence
AEFRHDSGYEVHHQXXXXXAEDXXXXXXXXXXXX

SEQ ID NO: 863 - protein, 33 aa, Artificial Sequence
  synthetic
  MISC_FEATURE (14)..(14): Xaa is lysine, arginine, or an amino acid residue which is covalently linked to another amino acid residue of the sequence
  MISC_FEATURE (15)..(15): Xaa is leucine, isoleucine, valine, phenylalanine, methionine, or an amino acid residue which is covalently linked to another amino acid residue of the sequence
  MISC_FEATURE (16)..(16): Xaa is valine, leucine, isoleucine, alanine, methionine, or an amino acid residue which is covalently linked to another amino acid residue of the sequence
  MISC_FEATURE (17)..(17): Xaa is phenylalanine, tyrosine, valine, leucine, isoleucine, methionine, or an amino acid residue which is covalently linked to another amino acid residue of the sequence
  MISC_FEATURE (18)..(18): Xaa is phenylalanine, tyrosine, valine, leucine, isoleucine, methionine, or an amino acid residue which is covalently linked to another amino acid residue of the sequence
  MISC_FEATURE (22)..(22): Xaa is valine, leucine, isoleucine, alanine, methionine, or an amino acid residue which is covalently linked to another amino acid residue of the sequence
  MISC_FEATURE (23)..(23): Xaa is glycine, alanine, serine, or an amino acid residue which is covalently linked to another amino acid residue of the sequence
  MISC_FEATURE (24)..(24): Xaa is serine, glycine, alanine, threonine, or an amino acid residue which is covalently linked to another amino acid residue of the sequence
  MISC_FEATURE (25)..(25): Xaa is asparagine, glutamine, methionine, or an amino acid residue which is covalently linked to another amino acid residue of the sequence
  MISC_FEATURE (26)..(26): Xaa is lysine, arginine, or an amino acid residue which is covalently linked to another amino acid residue of the sequence
  MISC_FEATURE (27)..(27): Xaa is glycine, alanine, serine, or an amino acid residue which is covalently linked to another amino acid residue of the sequence
  MISC_FEATURE (28)..(28): Xaa is alanine, valine, glycine, serine, or an amino acid residue which is covalently linked to another amino acid residue of the sequence
  MISC_FEATURE (29)..(29): Xaa is isoleucine, leucine, valine, phenylalanine, methionine, or an amino acid residue which is covalently linked to another amino acid residue of the sequence
  MISC_FEATURE (30)..(30): Xaa is isoleucine, leucine, valine, phenylalanine, methionine, or an amino acid residue which is covalently linked to another amino acid residue of the sequence
  MISC_FEATURE (31)..(31): Xaa is glycine, alanine, serine, or an amino acid residue which is covalently linked to another amino acid residue of the sequence
  MISC_FEATURE (32)..(32): Xaa is leucine, isoleucine, valine, phenylalanine, methionine, or an amino acid residue which is covalently linked to another amino acid residue of the sequence
  MISC_FEATURE (33)..(33): Xaa is methionine, valine, leucine, isoleucine, alanine, or an amino acid residue which is covalently linked to another amino acid residue of the sequence
EFRHDSGYEVHHQXXXXXAEDXXXXXXXXXXXX

SEQ ID NO: 864 - protein, 32 aa, Artificial Sequence
  synthetic
  MISC_FEATURE (13)..(13): Xaa is lysine, arginine, or an amino acid residue which is covalently linked to another amino acid residue of the sequence
  MISC_FEATURE (14)..(14): Xaa is leucine, isoleucine, valine, phenylalanine, methionine, or an amino acid residue which is covalently linked to another amino acid residue of the sequence
  MISC_FEATURE (15)..(15): Xaa is valine, leucine, isoleucine, alanine, methionine, or an amino acid residue which is covalently linked to another amino acid residue of the sequence
  MISC_FEATURE (16)..(16): Xaa is phenylalanine, tyrosine, valine, leucine, isoleucine, methionine, or an amino acid residue which is covalently linked to another amino acid residue of the sequence
  MISC_FEATURE (17)..(17): Xaa is phenylalanine, tyrosine, valine, leucine, isoleucine, methionine, or an amino acid residue which is covalently linked to another amino acid residue of the sequence
  MISC_FEATURE (21)..(21): Xaa is valine, leucine, isoleucine, alanine, methionine, or an amino acid residue which is covalently linked to another amino acid residue of the sequence
  MISC_FEATURE (22)..(22): Xaa is glycine, alanine, serine, or an amino acid residue which is covalently linked to another amino acid residue of the sequence
  MISC_FEATURE (23)..(23): Xaa is serine, glycine, alanine, threonine, or an amino acid residue which is covalently linked to another amino acid residue of the sequence
  MISC_FEATURE (24)..(24): Xaa is asparagine, glutamine, methionine, or an amino acid residue which is covalently linked to another amino acid residue of the sequence
  MISC_FEATURE (25)..(25): Xaa is lysine, arginine, or an amino acid residue which is covalently linked to another amino acid residue of the sequence
  MISC_FEATURE (26)..(26): Xaa is glycine, alanine, serine, or an amino acid residue which is covalently linked to another amino acid residue of the sequence
  MISC_FEATURE (27)..(27): Xaa is alanine, valine, glycine, serine, or an amino acid residue which is covalently linked to another amino acid residue of the sequence
  MISC_FEATURE (28)..(28): Xaa is isoleucine, leucine, valine, phenylalanine, methionine, or an amino acid residue which is covalently linked to another amino acid residue of the sequence
  MISC_FEATURE (29)..(29): Xaa is isoleucine, leucine, valine, phenylalanine, methionine, or an amino acid residue which is covalently linked to another amino acid residue of the sequence
  MISC_FEATURE (30)..(30): Xaa is glycine, alanine, serine, or an amino acid residue which is covalently linked to another amino acid residue of the sequence
  MISC_FEATURE (31)..(31): Xaa is leucine, isoleucine, valine, phenylalanine, methionine, or an amino acid residue which is covalently linked to another amino acid residue of the sequence
  MISC_FEATURE (32)..(32): Xaa is methionine, valine, leucine, isoleucine, alanine, or an amino acid residue which is covalently linked to another amino acid residue of the sequence
FRHDSGYEVHHQXXXXXAEDXXXXXXXXXXXX

SEQ ID NO: 865 - protein, 31 aa, Artificial Sequence
  synthetic
  MISC_FEATURE (12)..(12): Xaa is lysine, arginine, or an amino acid residue which is covalently linked to another amino acid residue of the sequence
  MISC_FEATURE (13)..(13): Xaa is leucine, isoleucine, valine, phenylalanine, methionine, or an amino acid residue which is covalently linked to another amino acid residue of the sequence
  MISC_FEATURE (14)..(14): Xaa is valine, leucine, isoleucine, alanine, methionine, or an amino acid residue which is covalently linked to another amino acid residue of the sequence
  MISC_FEATURE (15)..(15): Xaa is phenylalanine, tyrosine, valine, leucine, isoleucine, methionine, or an amino acid residue which is covalently linked to another amino acid residue of the sequence
  MISC_FEATURE (16)..(16): Xaa is phenylalanine, tyrosine, valine, leucine, isoleucine, methionine, or an amino acid residue which is covalently linked to another amino acid residue of the sequence
  MISC_FEATURE (20)..(20): Xaa is valine, leucine, isoleucine, alanine, methionine, or an amino acid residue which is covalently linked to another amino acid residue of the sequence
  MISC_FEATURE (21)..(21): Xaa is glycine, alanine, serine, or an amino acid residue which is covalently linked to another amino acid residue of the sequence
  MISC_FEATURE (22)..(22): Xaa is serine, glycine, alanine, threonine, or an amino acid residue which is covalently linked to another amino acid residue of the sequence
  MISC_FEATURE (23)..(23): Xaa is asparagine, glutamine, methionine, or an amino acid residue which is covalently linked to another amino acid residue of the sequence
  MISC_FEATURE (24)..(24): Xaa is lysine, arginine, or an amino acid residue which is covalently linked to another amino acid residue of the sequence
  MISC_FEATURE (25)..(25): Xaa is glycine, alanine, serine, or an amino acid residue which is covalently linked to another amino acid residue of the sequence
  MISC_FEATURE (26)..(26): Xaa is alanine, valine, glycine, serine, or an amino acid residue which is covalently linked to another amino acid residue of the sequence
  MISC_FEATURE (27)..(27): Xaa is isoleucine, leucine, valine, phenylalanine, methionine, or an amino acid residue which is covalently linked to another amino acid residue of the sequence
  MISC_FEATURE (28)..(28): Xaa is isoleucine, leucine, valine, phenylalanine, methionine, or an amino acid residue which is covalently linked to another amino acid residue of the sequence
  MISC_FEATURE (29)..(29): Xaa is glycine, alanine, serine, or an amino acid residue which is covalently linked to another amino acid residue of the sequence
  MISC_FEATURE (30)..(30): Xaa is leucine, isoleucine, valine, phenylalanine, methionine, or an amino acid residue which is covalently linked to another amino acid residue of the sequence
  MISC_FEATURE (31)..(31): Xaa is methionine, valine, leucine, isoleucine, alanine, or an amino acid residue which is covalently linked to another amino acid residue of the sequence
RHDSGYEVHHQXXXXXAEDXXXXXXXXXXXX

SEQ ID NO: 866 - protein, 30 aa, Artificial Sequence
  synthetic
  MISC_FEATURE (11)..(11): Xaa is lysine, arginine, or an amino acid residue which is covalently linked to another amino acid residue of the sequence
  MISC_FEATURE (12)..(12): Xaa is leucine, isoleucine, valine, phenylalanine, methionine, or an amino acid residue which is covalently linked to another amino acid residue of the sequence
  MISC_FEATURE (13)..(13): Xaa is valine, leucine, isoleucine, alanine, methionine, or an amino acid residue which is covalently linked to another amino acid residue of the sequence
  MISC_FEATURE (14)..(14): Xaa is phenylalanine, tyrosine, valine, leucine, isoleucine, methionine, or an amino acid residue which is covalently linked to another amino acid residue of the sequence
  MISC_FEATURE (15)..(15): Xaa is phenylalanine, tyrosine, valine, leucine, isoleucine, methionine, or an amino acid residue which is covalently linked to another amino acid residue of the sequence
  MISC_FEATURE (19)..(19): Xaa is valine, leucine, isoleucine, alanine, methionine, or an amino acid residue which is covalently linked to another amino acid residue of the sequence
  MISC_FEATURE (20)..(20): Xaa is glycine, alanine, serine, or an amino acid residue which is covalently linked to another amino acid residue of the sequence
  MISC_FEATURE (21)..(21): Xaa is serine, glycine, alanine, threonine, or an amino acid residue which is covalently linked to another amino acid residue of the sequence
  MISC_FEATURE (22)..(22): Xaa is asparagine, glutamine, methionine, or an amino acid residue which is covalently linked to another amino acid residue of the sequence
  MISC_FEATURE (23)..(23): Xaa is lysine, arginine, or an amino acid residue which is covalently linked to another amino acid residue of the sequence
  MISC_FEATURE (24)..(24): Xaa is glycine, alanine, serine, or an amino acid residue which is covalently linked to another amino acid residue of the sequence
  MISC_FEATURE (25)..(25): Xaa is alanine, valine, glycine, serine, or an amino acid residue which is covalently linked to another amino acid residue of the sequence
  MISC_FEATURE (26)..(26): Xaa is isoleucine, leucine, valine, phenylalanine, methionine, or an amino acid residue which is covalently linked to another amino acid residue of the sequence
  MISC_FEATURE (27)..(27): Xaa is isoleucine, leucine, valine, phenylalanine, methionine, or an amino acid residue which is covalently linked to another amino acid residue of the sequence
  MISC_FEATURE (28)..(28): Xaa is glycine, alanine, serine, or an amino acid residue which is covalently linked to another amino acid residue of the sequence
  MISC_FEATURE (29)..(29): Xaa is leucine, isoleucine, valine, phenylalanine, methionine, or an amino acid residue which is covalently linked to another amino acid residue of the sequence
  MISC_FEATURE (30)..(30): Xaa is methionine, valine, leucine, isoleucine, alanine, or an amino acid residue which is covalently linked to another amino acid residue of the sequence
HDSGYEVHHQXXXXXAEDXXXXXXXXXXXX

SEQ ID NO: 867 - protein, 29 aa, Artificial Sequence
  synthetic
  MISC_FEATURE (10)..(10): Xaa is lysine, arginine, or an amino acid residue which is covalently linked to another amino acid residue of the sequence
  MISC_FEATURE (11)..(11): Xaa is leucine, isoleucine, valine, phenylalanine, methionine, or an amino acid residue which is covalently linked to another amino acid residue of the sequence
  MISC_FEATURE (12)..(12): Xaa is valine, leucine, isoleucine, alanine, methionine, or an amino acid residue which is covalently linked to another amino acid residue of the sequence
  MISC_FEATURE (13)..(13): Xaa is phenylalanine, tyrosine, valine, leucine, isoleucine, methionine, or an amino acid residue which is covalently linked to another amino acid residue of the sequence
  MISC_FEATURE (14)..(14): Xaa is phenylalanine, tyrosine, valine, leucine, isoleucine, methionine, or an amino acid residue which is covalently linked to another amino acid residue of the sequence
  MISC_FEATURE (18)..(18): Xaa is valine, leucine, isoleucine, alanine, methionine, or an amino acid residue which is covalently linked to another amino acid residue of the sequence
  MISC_FEATURE (19)..(19): Xaa is glycine, alanine, serine, or an amino acid residue which is covalently linked to another amino acid residue of the sequence
  MISC_FEATURE (20)..(20): Xaa is serine, glycine, alanine, threonine, or an amino acid residue which is covalently linked to another amino acid residue of the sequence
  MISC_FEATURE (21)..(21): Xaa is asparagine, glutamine, methionine, or an amino acid residue which is covalently linked to another amino acid residue of the sequence
  MISC_FEATURE (22)..(22): Xaa is lysine, arginine, or an amino acid residue which is covalently linked to another amino acid residue of the sequence
  MISC_FEATURE (23)..(23): Xaa is glycine, alanine, serine, or an amino acid residue which is covalently linked to another amino acid residue of the sequence
  MISC_FEATURE (24)..(24): Xaa is alanine, valine, glycine, serine, or an amino acid residue which is covalently linked to another amino acid residue of the sequence
  MISC_FEATURE (25)..(25): Xaa is isoleucine, leucine, valine, phenylalanine, methionine, or an amino acid residue which is covalently linked to another amino acid residue of the sequence
  MISC_FEATURE (26)..(26): Xaa is isoleucine, leucine, valine, phenylalanine, methionine, or an amino acid residue which is covalently linked to another amino acid residue of the sequence
  MISC_FEATURE (27)..(27): Xaa is glycine, alanine, serine, or an amino acid residue which is covalently linked to another amino acid residue of the sequence
  MISC_FEATURE (28)..(28): Xaa is leucine, isoleucine, valine, phenylalanine, methionine, or an amino acid residue which is covalently linked to another amino acid residue of the sequence
  MISC_FEATURE (29)..(29): Xaa is methionine, valine, leucine, isoleucine, alanine, or an amino acid residue which is covalently linked to another amino acid residue of the sequence
DSGYEVHHQXXXXXAEDXXXXXXXXXXXX

SEQ ID NO: 868 - protein, 28 aa, Artificial Sequence
  synthetic
  MISC_FEATURE (9)..(9): Xaa is lysine, arginine, or an amino acid residue which is covalently linked to another amino acid residue of the sequence
  MISC_FEATURE (10)..(10): Xaa is leucine, isoleucine, valine, phenylalanine, methionine, or an amino acid residue which is covalently linked to another amino acid residue of the sequence
  MISC_FEATURE (11)..(11): Xaa is valine, leucine, isoleucine, alanine, methionine, or an amino acid residue which is covalently linked to another amino acid residue of the sequence
  MISC_FEATURE (12)..(12): Xaa is phenylalanine, tyrosine, valine, leucine, isoleucine, methionine, or an amino acid residue which is covalently linked to another amino acid residue of the sequence
  MISC_FEATURE (13)..(13): Xaa is phenylalanine, tyrosine, valine, leucine, isoleucine, methionine, or an amino acid residue which is covalently linked to another amino acid residue of the sequence
  MISC_FEATURE (17)..(17): Xaa is valine, leucine, isoleucine, alanine, methionine, or an amino acid residue which is covalently linked to another amino acid residue of the sequence
  MISC_FEATURE (18)..(18): Xaa is glycine, alanine, serine, or an amino acid residue which is covalently linked to another amino acid residue of the sequence
  MISC_FEATURE (19)..(19): Xaa is serine, glycine, alanine, threonine, or an amino acid residue which is covalently linked to another amino acid residue of the sequence
  MISC_FEATURE (20)..(20): Xaa is asparagine, glutamine, methionine, or an amino acid residue which is covalently linked to another amino acid residue of the sequence
  MISC_FEATURE (21)..(21): Xaa is lysine, arginine, or an amino acid residue which is covalently linked to another amino acid residue of the sequence
  MISC_FEATURE (22)..(22): Xaa is glycine, alanine, serine, or an amino acid residue which is covalently linked to another amino acid residue of the sequence
  MISC_FEATURE (23)..(23): Xaa is alanine, valine, glycine, serine, or an amino acid residue which is covalently linked to another amino acid residue of the sequence
  MISC_FEATURE (24)..(24): Xaa is isoleucine, leucine, valine, phenylalanine, methionine, or an amino acid residue which is covalently linked to another amino acid residue of the sequence
  MISC_FEATURE (25)..(25): Xaa is isoleucine, leucine, valine, phenylalanine, methionine, or an amino acid residue which is covalently linked to another amino acid residue of the sequence
  MISC_FEATURE (26)..(26): Xaa is glycine, alanine, serine, or an amino acid residue which is covalently linked to another amino acid residue of the sequence
  MISC_FEATURE (27)..(27): Xaa is leucine, isoleucine, valine, phenylalanine, methionine, or an amino acid residue which is covalently linked to another amino acid residue of the sequence
  MISC_FEATURE (28)..(28): Xaa is methionine, valine, leucine, isoleucine, alanine, or an amino acid residue which is covalently linked to another amino acid residue of the sequence
SGYEVHHQXXXXXAEDXXXXXXXXXXXX

SEQ ID NO: 869 - protein, 27 aa, Artificial Sequence
  synthetic
  MISC_FEATURE (8)..(8): Xaa is lysine, arginine, or an amino acid residue which is covalently linked to another amino acid residue of the sequence
  MISC_FEATURE (9)..(9): Xaa is leucine, isoleucine, valine, phenylalanine, methionine, or an amino acid residue which is covalently linked to another amino acid residue of the sequence
  MISC_FEATURE (10)..(10): Xaa is valine, leucine, isoleucine, alanine, methionine, or an amino acid residue which is covalently linked to another amino acid residue of the sequence
  MISC_FEATURE (11)..(11): Xaa is phenylalanine, tyrosine, valine, leucine, isoleucine, methionine, or an amino acid residue which is covalently linked to another amino acid residue of the sequence
  MISC_FEATURE (12)..(12): Xaa is phenylalanine, tyrosine, valine, leucine, isoleucine, methionine, or an amino acid residue which is covalently linked to another amino acid residue of the sequence
  MISC_FEATURE (16)..(16): Xaa is valine, leucine, isoleucine, alanine, methionine, or an amino acid residue which is covalently linked to another amino acid residue of the sequence
  MISC_FEATURE (17)..(17): Xaa is glycine, alanine, serine, or an amino acid residue which is covalently linked to another amino acid residue of the sequence
  MISC_FEATURE (18)..(18): Xaa is serine, glycine, alanine, threonine, or an amino acid residue which is covalently linked to another amino acid residue of the sequence
  MISC_FEATURE (19)..(19): Xaa is asparagine, glutamine, methionine, or an amino acid residue which is covalently linked to another amino acid residue of the sequence
  MISC_FEATURE (20)..(20): Xaa is lysine, arginine, or an amino acid residue which is covalently linked to another amino acid residue of the sequence
  MISC_FEATURE (21)..(21): Xaa is glycine, alanine, serine, or an amino acid residue which is covalently linked to another amino acid residue of the sequence
  MISC_FEATURE (22)..(22): Xaa is alanine, valine, glycine, serine, or an amino acid residue which is covalently linked to another amino acid residue of the sequence
  MISC_FEATURE (23)..(23): Xaa is isoleucine, leucine, valine, phenylalanine, methionine, or an amino acid residue which is covalently linked to another amino acid residue of the sequence
  MISC_FEATURE (24)..(24): Xaa is isoleucine, leucine, valine, phenylalanine, methionine, or an amino acid residue which is covalently linked to another amino acid residue of the sequence
  MISC_FEATURE (25)..(25): Xaa is glycine, alanine, serine, or an amino acid residue which is covalently linked to another amino acid residue of the sequence
  MISC_FEATURE (26)..(26): Xaa is leucine, isoleucine, valine, phenylalanine, methionine, or an amino acid residue which is covalently linked to another amino acid residue of the sequence
  MISC_FEATURE (27)..(27): Xaa is methionine, valine, leucine, isoleucine, alanine, or an amino acid residue which is covalently linked to another amino acid residue of the sequence
GYEVHHQXXXXXAEDXXXXXXXXXXXX

SEQ ID NO: 870 - protein, 26 aa, Artificial Sequence
  synthetic
  MISC_FEATURE (7)..(7): Xaa is lysine, arginine, or an amino acid residue which is covalently linked to another amino acid residue of the sequence
  MISC_FEATURE (8)..(8): Xaa is leucine, isoleucine, valine, phenylalanine, methionine, or an amino acid residue which is covalently linked to another amino acid residue of the sequence
  MISC_FEATURE (9)..(9): Xaa is valine, leucine, isoleucine, alanine, methionine, or an amino acid residue which is covalently linked to another amino acid residue of the sequence
  MISC_FEATURE (10)..(10): Xaa is phenylalanine, tyrosine, valine, leucine, isoleucine, methionine, or an amino acid residue which is covalently linked to another amino acid residue of the sequence
  MISC_FEATURE (11)..(11): Xaa is phenylalanine, tyrosine, valine, leucine, isoleucine, methionine, or an amino acid residue which is covalently linked to another amino acid residue of the sequence
  MISC_FEATURE (15)..(15): Xaa is valine, leucine, isoleucine, alanine, methionine, or an amino acid residue which is covalently linked to another amino acid residue of the sequence
  MISC_FEATURE (16)..(16): Xaa is glycine, alanine, serine, or an amino acid residue which is covalently linked to another amino acid residue of the sequence
  MISC_FEATURE (17)..(17): Xaa is serine, glycine, alanine, threonine, or an amino acid residue which is covalently linked to another amino acid residue of the sequence
  MISC_FEATURE (18)..(18): Xaa is asparagine, glutamine, methionine, or an amino acid residue which is covalently linked to another amino acid residue of the sequence
  MISC_FEATURE (19)..(19): Xaa is lysine, arginine, or an amino acid residue which is covalently linked to another amino acid residue of the sequence
  MISC_FEATURE (20)..(20): Xaa is glycine, alanine, serine, or an amino acid residue which is covalently linked to another amino acid residue of the sequence
  MISC_FEATURE (21)..(21): Xaa is alanine, valine, glycine, serine, or an amino acid residue which is covalently linked to another amino acid residue of the sequence
  MISC_FEATURE (22)..(22): Xaa is isoleucine, leucine, valine, phenylalanine, methionine, or an amino acid residue which is covalently linked to another amino acid residue of the sequence
  MISC_FEATURE (23)..(23): Xaa is isoleucine, leucine, valine, phenylalanine, methionine, or an amino acid residue which is covalently linked to another amino acid residue of the sequence
  MISC_FEATURE (24)..(24): Xaa is glycine, alanine, serine, or an amino acid residue which is covalently linked to another amino acid residue of the sequence
  MISC_FEATURE (25)..(25): Xaa is leucine, isoleucine, valine, phenylalanine, methionine, or an amino acid residue which is covalently linked to another amino acid residue of the sequence
  MISC_FEATURE (26)..(26): Xaa is methionine, valine, leucine, isoleucine, alanine, or an amino acid residue which is covalently linked to another amino acid residue of the sequence
YEVHHQXXXXXAEDXXXXXXXXXXXX

SEQ ID NO: 871 - protein, 25 aa, Artificial Sequence
  synthetic
  MISC_FEATURE (6)..(6): Xaa is lysine, arginine, or an amino acid residue which is covalently linked to another amino acid residue of the sequence
  MISC_FEATURE (7)..(7): Xaa is leucine, isoleucine, valine, phenylalanine, methionine, or an amino acid residue which is covalently linked to another amino acid residue of the sequence
  MISC_FEATURE (8)..(8): Xaa is valine, leucine, isoleucine, alanine, methionine, or an amino acid residue which is covalently linked to another amino acid residue of the sequence
  MISC_FEATURE (9)..(9): Xaa is phenylalanine, tyrosine, valine, leucine, isoleucine, methionine, or an amino acid residue which is covalently linked to another amino acid residue of the sequence
  MISC_FEATURE (10)..(10): Xaa is phenylalanine, tyrosine, valine, leucine, isoleucine, methionine, or an amino acid residue which is covalently linked to another amino acid residue of the sequence
  MISC_FEATURE (14)..(14): Xaa is valine, leucine, isoleucine, alanine, methionine, or an amino acid residue which is covalently linked to another amino acid residue of the sequence
  MISC_FEATURE (15)..(15): Xaa is glycine, alanine, serine, or an amino acid residue which is covalently linked to another amino acid residue of the sequence
  MISC_FEATURE (16)..(16): Xaa is serine, glycine, alanine, threonine, or an amino acid residue which is covalently linked to another amino acid residue of the sequence
  MISC_FEATURE (17)..(17): Xaa is asparagine, glutamine, methionine, or an amino acid residue which is covalently linked to another amino acid residue of the sequence
  MISC_FEATURE (18)..(18): Xaa is lysine, arginine, or an amino acid residue which is covalently linked to another amino acid residue of the sequence
  MISC_FEATURE (19)..(19): Xaa is glycine, alanine, serine, or an amino acid residue which is covalently linked to another amino acid residue of the sequence
  MISC_FEATURE (20)..(20): Xaa is alanine, valine, glycine, serine, or an amino acid residue which is covalently linked to another amino acid residue of the sequence
  MISC_FEATURE (21)..(21): Xaa is isoleucine, leucine, valine, phenylalanine, methionine, or an amino acid residue which is covalently linked to another amino acid residue of the sequence
  MISC_FEATURE (22)..(22): Xaa is isoleucine, leucine, valine, phenylalanine, methionine, or an amino acid residue which is covalently linked to another amino acid residue of the sequence
  MISC_FEATURE (23)..(23): Xaa is glycine, alanine, serine, or an amino acid residue which is covalently linked to another amino acid residue of the sequence
  MISC_FEATURE (24)..(24): Xaa is leucine, isoleucine, valine, phenylalanine, methionine, or an amino acid residue which is covalently linked to another amino acid residue of the sequence
  MISC_FEATURE (25)..(25): Xaa is methionine, valine, leucine, isoleucine, alanine, or an amino acid residue which is covalently linked to another amino acid residue of the sequence
EVHHQXXXXXAEDXXXXXXXXXXXX

SEQ ID NO: 872 - protein, 24 aa, Artificial Sequence
  synthetic
  MISC_FEATURE (5)..(5): Xaa is lysine, arginine, or an amino acid residue which is covalently linked to another amino acid residue of the sequence
  MISC_FEATURE (6)..(6): Xaa is leucine, isoleucine, valine, phenylalanine, methionine, or an amino acid residue which is covalently linked to another amino acid residue of the sequence
  MISC_FEATURE (7)..(7): Xaa is valine, leucine, isoleucine, alanine, methionine, or an amino acid residue which is covalently linked to another amino acid residue of the sequence
  MISC_FEATURE (8)..(8): Xaa is phenylalanine, tyrosine, valine, leucine, isoleucine, methionine, or an amino acid residue which is covalently linked to another amino acid residue of the sequence
  MISC_FEATURE (9)..(9): Xaa is phenylalanine, tyrosine, valine, leucine, isoleucine, methionine, or an amino acid residue which is covalently linked to another amino acid residue of the sequence
  MISC_FEATURE (13)..(13): Xaa is valine, leucine, isoleucine, alanine, methionine, or an amino acid residue which is covalently linked to another amino acid residue of the sequence
  MISC_FEATURE (14)..(14): Xaa is glycine, alanine, serine, or an amino acid residue which is covalently linked to another amino acid residue of the sequence
  MISC_FEATURE (15)..(15): Xaa is serine, glycine, alanine, threonine, or an amino acid residue which is covalently linked to another amino acid residue of the sequence
  MISC_FEATURE (16)..(16): Xaa is asparagine, glutamine, methionine, or an amino acid residue which is covalently linked to another amino acid residue of the sequence
  MISC_FEATURE (17)..(17): Xaa is lysine, arginine, or an amino acid residue which is covalently linked to another amino acid residue of the sequence
  MISC_FEATURE (18)..(18): Xaa is glycine, alanine, serine, or an amino acid residue which is covalently linked to another amino acid residue of the sequence
  MISC_FEATURE (19)..(19): Xaa is alanine, valine, glycine, serine, or an amino acid residue which is covalently linked to another amino acid residue of the sequence
  MISC_FEATURE (20)..(20): Xaa is isoleucine, leucine, valine, phenylalanine, methionine, or an amino acid residue which is covalently linked to another amino acid residue of the sequence
  MISC_FEATURE (21)..(21): Xaa is isoleucine, leucine, valine, phenylalanine, methionine, or an amino acid residue which is covalently linked to another amino acid residue of the sequence
  MISC_FEATURE (22)..(22): Xaa is glycine, alanine, serine, or an amino acid residue which is covalently linked to another amino acid residue of the sequence
  MISC_FEATURE (23)..(23): Xaa is leucine, isoleucine, valine, phenylalanine, methionine, or an amino acid residue which is covalently linked to another amino acid residue of the sequence
  MISC_FEATURE (24)..(24): Xaa is methionine, valine, leucine, isoleucine, alanine, or an amino acid residue which is covalently linked to another amino acid residue of the sequence
VHHQXXXXXAEDXXXXXXXXXXXX

SEQ ID NO: 873 - protein, 23 aa, Artificial Sequence
  synthetic
  MISC_FEATURE (4)..(4): Xaa is lysine, arginine, or an amino acid residue which is covalently linked to another amino acid residue of the sequence
  MISC_FEATURE (5)..(5): Xaa is leucine, isoleucine, valine, phenylalanine, methionine, or an amino acid residue which is covalently linked to another amino acid residue of the sequence
  MISC_FEATURE (6)..(6): Xaa is valine, leucine, isoleucine, alanine, methionine, or an amino acid residue which is covalently linked to another amino acid residue of the sequence
  MISC_FEATURE (7)..(7): Xaa is phenylalanine, tyrosine, valine, leucine, isoleucine, methionine, or an amino acid residue which is covalently linked to another amino acid residue of the sequence
  MISC_FEATURE (8)..(8): Xaa is phenylalanine, tyrosine, valine, leucine, isoleucine, methionine, or an amino acid residue which is covalently linked to another amino acid residue of the sequence
  MISC_FEATURE (12)..(12): Xaa is valine, leucine, isoleucine, alanine, methionine, or an amino acid residue which is covalently linked to another amino acid residue of the sequence
  MISC_FEATURE (13)..(13): Xaa is glycine, alanine, serine, or an amino acid residue which is covalently linked to another amino acid residue of the sequence
  MISC_FEATURE (14)..(14): Xaa is serine, glycine, alanine, threonine, or an amino acid residue which is covalently linked to another amino acid residue of the sequence
  MISC_FEATURE (15)..(15): Xaa is asparagine, glutamine, methionine, or an amino acid residue which is covalently linked to another amino acid residue of the sequence
  MISC_FEATURE (16)..(16): Xaa is lysine, arginine, or an amino acid residue which is covalently linked to another amino acid residue of the sequence
  MISC_FEATURE (17)..(17): Xaa is glycine, alanine, serine, or an amino acid residue which is covalently linked to another amino acid residue of the sequence
  MISC_FEATURE (18)..(18): Xaa is alanine, valine, glycine, serine, or an amino acid residue which is covalently linked to another amino acid residue of the sequence
  MISC_FEATURE (19)..(19): Xaa is isoleucine, leucine, valine, phenylalanine, methionine, or an amino acid residue which is covalently linked to another amino acid residue of the sequence
  MISC_FEATURE (20)..(20): Xaa is isoleucine, leucine, valine, phenylalanine, methionine, or an amino acid residue which is covalently linked to another amino acid residue of the sequence
  MISC_FEATURE (21)..(21): Xaa is glycine, alanine, serine, or an amino acid residue which is covalently linked to another amino acid residue of the sequence
  MISC_FEATURE (22)..(22): Xaa is leucine, isoleucine, valine, phenylalanine, methionine, or an amino acid residue which is covalently linked to another amino acid residue of the sequence
  MISC_FEATURE (23)..(23): Xaa is methionine, valine, leucine, isoleucine, alanine, or an amino acid residue which is covalently linked to another amino acid residue of the sequence
HHQXXXXXAEDXXXXXXXXXXXX

SEQ ID NO: 874 - protein, 22 aa, Artificial Sequence
  synthetic
  MISC_FEATURE (3)..(3): Xaa is lysine, arginine, or an amino acid residue which is covalently linked to another amino acid residue of the sequence
  MISC_FEATURE (4)..(4): Xaa is leucine, isoleucine, valine, phenylalanine, methionine, or an amino acid residue which is covalently linked to another amino acid residue of the sequence
  MISC_FEATURE (5)..(5): Xaa is valine, leucine, isoleucine, alanine, methionine, or an amino acid residue which is covalently linked to another amino acid residue of the sequence
  MISC_FEATURE (6)..(6): Xaa is phenylalanine, tyrosine, valine, leucine, isoleucine, methionine, or an amino acid residue which is covalently linked to another amino acid residue of the sequence
  MISC_FEATURE (7)..(7): Xaa is phenylalanine, tyrosine, valine, leucine, isoleucine, methionine, or an amino acid residue which is covalently linked to another amino acid residue of the sequence
  MISC_FEATURE (11)..(11): Xaa is valine, leucine, isoleucine, alanine, methionine, or an amino acid residue which is covalently linked to another amino acid residue of the sequence
  MISC_FEATURE (12)..(12): Xaa is glycine, alanine, serine, or an amino acid residue which is covalently linked to another amino acid residue of the sequence
  MISC_FEATURE (13)..(13): Xaa is serine, glycine, alanine, threonine, or an amino acid residue which is covalently linked to another amino acid residue of the sequence
  MISC_FEATURE (14)..(14): Xaa is asparagine, glutamine, methionine, or an amino acid residue which is covalently linked to another amino acid residue of the sequence
  MISC_FEATURE (15)..(15): Xaa is lysine, arginine, or an amino acid residue which is covalently linked to another amino acid residue of the sequence
  MISC_FEATURE (16)..(16): Xaa is glycine, alanine, serine, or an amino acid residue which is covalently linked to another amino acid residue of the sequence
  MISC_FEATURE (17)..(17): Xaa is alanine, valine, glycine, serine, or an amino acid residue which is covalently linked to another amino acid residue of the sequence
  MISC_FEATURE (18)..(18): Xaa is isoleucine, leucine, valine, phenylalanine, methionine, or an amino acid residue which is covalently linked to another amino acid residue of the sequence
  MISC_FEATURE (19)..(19): Xaa is isoleucine, leucine, valine, phenylalanine, methionine, or an amino acid residue which is covalently linked to another amino acid residue of the sequence
  MISC_FEATURE (20)..(20): Xaa is glycine, alanine, serine, or an amino acid residue which is covalently linked to another amino acid residue of the sequence
  MISC_FEATURE (21)..(21): Xaa is leucine, isoleucine, valine, phenylalanine, methionine, or an amino acid residue which is covalently linked to another amino acid residue of the sequence
  MISC_FEATURE (22)..(22): Xaa is methionine, valine, leucine, isoleucine, alanine, or an amino acid residue which is covalently linked to another amino acid residue of the sequence
HQXXXXXAEDXXXXXXXXXXXX

SEQ ID NO: 875 - protein, 21 aa, Artificial Sequence
  synthetic
  MISC_FEATURE (2)..(2): Xaa is lysine, arginine, or an amino acid residue which is covalently linked to another amino acid residue of the sequence
  MISC_FEATURE (3)..(3): Xaa is leucine, isoleucine, valine, phenylalanine, methionine, or an amino acid residue which is covalently linked to another amino acid residue of the sequence
  MISC_FEATURE (4)..(4): Xaa is valine, leucine, isoleucine, alanine, methionine, or an amino acid residue which is covalently linked to another amino acid residue of the sequence
  MISC_FEATURE (5)..(5): Xaa is phenylalanine, tyrosine, valine, leucine, isoleucine, methionine, or an amino acid residue which is covalently linked to another amino acid residue of the sequence
  MISC_FEATURE (6)..(6): Xaa is phenylalanine, tyrosine, valine, leucine, isoleucine, methionine, or an amino acid residue which is covalently linked to another amino acid residue of the sequence
  MISC_FEATURE (10)..(10): Xaa is valine, leucine, isoleucine, alanine, methionine, or an amino acid residue which is covalently linked to another amino acid residue of the sequence
  MISC_FEATURE (11)..(11): Xaa is glycine, alanine, serine, or an amino acid residue which is covalently linked to another amino acid residue of the sequence
  MISC_FEATURE (12)..(12): Xaa is serine, glycine, alanine, threonine, or an amino acid residue which is covalently linked to another amino acid residue of the sequence
  MISC_FEATURE (13)..(13): Xaa is asparagine, glutamine, methionine, or an amino acid residue which is covalently linked to another amino acid residue of the sequence
  MISC_FEATURE (14)..(14): Xaa is lysine, arginine, or an amino acid residue which is covalently linked to another amino acid residue of the sequence
  MISC_FEATURE (15)..(15): Xaa is glycine, alanine, serine, or an amino acid residue which is covalently linked to another amino acid residue of the sequence
  MISC_FEATURE (16)..(16): Xaa is alanine, valine, glycine, serine, or an amino acid residue which is covalently linked to another amino acid residue of the sequence
  MISC_FEATURE (17)..(17): Xaa is isoleucine, leucine, valine, phenylalanine, methionine, or an amino acid residue which is covalently linked to another amino acid residue of the sequence
  MISC_FEATURE (18)..(18): Xaa is isoleucine, leucine, valine, phenylalanine, methionine, or an amino acid residue which is covalently linked to another amino acid residue of the sequence
  MISC_FEATURE (19)..(19): Xaa is glycine, alanine, serine, or an amino acid residue which is covalently linked to another amino acid residue of the sequence
  MISC_FEATURE (20)..(20): Xaa is leucine, isoleucine, valine, phenylalanine, methionine, or an amino acid residue which is covalently linked to another amino acid residue of the sequence
  MISC_FEATURE (21)..(21): Xaa is methionine, valine, leucine, isoleucine, alanine, or an amino acid residue which is covalently linked to another amino acid residue of the sequence
QXXXXXAEDXXXXXXXXXXXX

SEQ ID NO: 876 - protein, 20 aa, Artificial Sequence
  synthetic
  MISC_FEATURE (1)..(1): Xaa is lysine, arginine, or an amino acid residue which is covalently linked to another amino acid residue of the sequence
  MISC_FEATURE (2)..(2): Xaa is leucine, isoleucine, valine, phenylalanine, methionine, or an amino acid residue which is covalently linked to another amino acid residue of the sequence
  MISC_FEATURE (3)..(3): Xaa is valine, leucine, isoleucine, alanine, methionine, or an amino acid residue which is covalently linked to another amino acid residue of the sequence
  MISC_FEATURE (4)..(4): Xaa is phenylalanine, tyrosine, valine, leucine, isoleucine, methionine, or an amino acid residue which is covalently linked to another amino acid residue of the sequence
  MISC_FEATURE (5)..(5): Xaa is phenylalanine, tyrosine, valine, leucine, isoleucine, methionine, or an amino acid residue which is covalently linked to another amino acid residue of the sequence
  MISC_FEATURE (9)..(9): Xaa is valine, leucine, isoleucine, alanine, methionine, or an amino acid residue which is covalently linked to another amino acid residue of the sequence
  MISC_FEATURE (10)..(10): Xaa is glycine, alanine, serine, or an amino acid residue which is covalently linked to another amino acid residue of the sequence
  MISC_FEATURE (11)..(11): Xaa is serine, glycine, alanine, threonine, or an amino acid residue which is covalently linked to another amino acid residue of the sequence
  MISC_FEATURE (12)..(12): Xaa is asparagine, glutamine, methionine, or an amino acid residue which is covalently linked to another amino acid residue of the sequence
  MISC_FEATURE (13)..(13): Xaa is lysine, arginine, or an amino acid residue which is covalently linked to another amino acid residue of the sequence
  MISC_FEATURE (14)..(14): Xaa is glycine, alanine, serine, or an amino acid residue which is covalently linked to another amino acid residue of the sequence
  MISC_FEATURE (15)..(15): Xaa is alanine, valine, glycine, serine, or an amino acid residue which is covalently linked to another amino acid residue of the sequence
  MISC_FEATURE (16)..(16): Xaa is isoleucine, leucine, valine, phenylalanine, methionine, or an amino acid residue which is covalently linked to another amino acid residue of the sequence
  MISC_FEATURE (17)..(17): Xaa is isoleucine, leucine, valine, phenylalanine, methionine, or an amino acid residue which is covalently linked to another amino acid residue of the sequence
  MISC_FEATURE (18)..(18): Xaa is glycine, alanine, serine, or an amino acid residue which is covalently linked to another amino acid residue of the sequence
  MISC_FEATURE (19)..(19): Xaa is leucine, isoleucine, valine, phenylalanine, methionine, or an amino acid residue which is covalently linked to another amino acid residue of the sequence
  MISC_FEATURE (20)..(20): Xaa is methionine, valine, leucine, isoleucine, alanine, or an amino acid residue which is covalently linked to another amino acid residue of the sequence
XXXXXAEDXXXXXXXXXXXX

SEQ ID NO: 877 - protein, 19 aa, Artificial Sequence
  synthetic
  MISC_FEATURE (1)..(1): Xaa is leucine, isoleucine, valine, phenylalanine, methionine, or an amino acid residue which is covalently linked to another amino acid residue of the sequence
  MISC_FEATURE (2)..(2): Xaa is valine, leucine, isoleucine, alanine, methionine, or an amino acid residue which is covalently linked to another amino acid residue of the sequence
  MISC_FEATURE (3)..(3): Xaa is phenylalanine, tyrosine, valine, leucine, isoleucine, methionine, or an amino acid residue which is covalently linked to another amino acid residue of the sequence
  MISC_FEATURE (4)..(4): Xaa is phenylalanine, tyrosine, valine, leucine, isoleucine, methionine, or an amino acid residue which is covalently linked to another amino acid residue of the sequence
  MISC_FEATURE (8)..(8): Xaa is valine, leucine, isoleucine, alanine, methionine, or an amino acid residue which is covalently linked to another amino acid residue of the sequence
  MISC_FEATURE (9)..(9): Xaa is glycine, alanine, serine, or an amino acid residue which is covalently linked to another amino acid residue of the sequence
  MISC_FEATURE (10)..(10): Xaa is serine, glycine, alanine, threonine, or an amino acid residue which is covalently linked to another amino acid residue of the sequence
  MISC_FEATURE (11)..(11): Xaa is asparagine, glutamine, methionine, or an amino acid residue which is covalently linked to another amino acid residue of the sequence
  MISC_FEATURE (12)..(12): Xaa is lysine, arginine, or an amino acid residue which is covalently linked to another amino acid residue of the sequence
  MISC_FEATURE (13)..(13): Xaa is glycine, alanine, serine, or an amino acid residue which is covalently linked to another amino acid residue of the sequence
  MISC_FEATURE (14)..(14): Xaa is alanine, valine, glycine, serine, or an amino acid residue which is covalently linked to another amino acid residue of the sequence
  MISC_FEATURE (15)..(15): Xaa is isoleucine, leucine, valine, phenylalanine, methionine, or an amino acid residue which is covalently linked to another amino acid residue of the sequence
  MISC_FEATURE (16)..(16): Xaa is isoleucine, leucine, valine, phenylalanine, methionine, or an amino acid residue which is covalently linked to another amino acid residue of the sequence
  MISC_FEATURE (17)..(17): Xaa is glycine, alanine, serine, or an amino acid residue which is covalently linked to another amino acid residue of the sequence
  MISC_FEATURE (18)..(18): Xaa is leucine, isoleucine, valine, phenylalanine, methionine, or an amino acid residue which is covalently linked to another amino acid residue of the sequence
XXXXAEDXXXXXXXXXXXM

SEQ ID NO: 878 - protein, 18 aa, Artificial Sequence
  synthetic
  MISC_FEATURE (1)..(1): Xaa is valine, leucine, isoleucine, alanine, methionine, or an amino acid residue which is covalently linked to another amino acid residue of the sequence
  MISC_FEATURE (2)..(2): Xaa is phenylalanine, tyrosine, valine, leucine, isoleucine, methionine, or an amino acid residue which is covalently linked to another amino acid residue of the sequence
  MISC_FEATURE (3)..(3): Xaa is phenylalanine, tyrosine, valine, leucine, isoleucine, methionine, or an amino acid residue which is covalently linked to another amino acid residue of the sequence
  MISC_FEATURE (7)..(7): Xaa is valine, leucine, isoleucine, alanine, methionine, or an amino acid residue which is covalently linked to another amino acid residue of the sequence
  MISC_FEATURE (8)..(8): Xaa is glycine, alanine, serine, or an amino acid residue which is covalently linked to another amino acid residue of the sequence
  MISC_FEATURE (9)..(9): Xaa is serine, glycine, alanine, threonine, or an amino acid residue which is covalently linked to another amino acid residue of the sequence
  MISC_FEATURE (10)..(10): Xaa is asparagine, glutamine, methionine, or an amino acid residue which is covalently linked to another amino acid residue of the sequence
  MISC_FEATURE (11)..(11): Xaa is lysine, arginine, or an amino acid residue which is covalently linked to another amino acid residue of the sequence
  MISC_FEATURE (12)..(12): Xaa is glycine, alanine, serine, or an amino acid residue which is covalently linked to another amino acid residue of the sequence
  MISC_FEATURE (13)..(13): Xaa is alanine, valine, glycine, serine, or an amino acid residue which is covalently linked to another amino acid residue of the sequence
  MISC_FEATURE (14)..(14): Xaa is isoleucine, leucine, valine, phenylalanine, methionine, or an amino acid residue which is covalently linked to another amino acid residue of the sequence
  MISC_FEATURE (15)..(15): Xaa is isoleucine, leucine, valine, phenylalanine, methionine, or an amino acid residue which is covalently linked to another amino acid residue of the sequence
  MISC_FEATURE (16)..(16): Xaa is glycine, alanine, serine, or an amino acid residue which is covalently linked to another amino acid residue of the sequence
XXXAEDXXXXXXXXXXLM

SEQ ID NO: 879 - protein, 17 aa, Artificial Sequence
  synthetic
  MISC_FEATURE (1)..(1): Xaa is phenylalanine, tyrosine, valine, leucine, isoleucine, methionine, or an amino acid residue which is covalently linked to another amino acid residue of the sequence
  MISC_FEATURE (2)..(2): Xaa is phenylalanine, tyrosine, valine, leucine, isoleucine, methionine, or an amino acid residue which is covalently linked to another amino acid residue of the sequence
  MISC_FEATURE (6)..(6): Xaa is valine, leucine, isoleucine, alanine, methionine, or an amino acid residue which is covalently linked to another amino acid residue of the sequence
  MISC_FEATURE (7)..(7): Xaa is glycine, alanine, serine, or an amino acid residue which is covalently linked to another amino acid residue of the sequence
  MISC_FEATURE (8)..(8): Xaa is serine, glycine, alanine, threonine, or an amino acid residue which is covalently linked to another amino acid residue of the sequence
  MISC_FEATURE (9)..(9): Xaa is asparagine, glutamine, methionine, or an amino acid residue which is covalently linked to another amino acid residue of the sequence
  MISC_FEATURE (10)..(10): Xaa is lysine, arginine, or an amino acid residue which is covalently linked to another amino acid residue of the sequence
  MISC_FEATURE (11)..(11): Xaa is glycine, alanine, serine, or an amino acid residue which is covalently linked to another amino acid residue of the sequence
  MISC_FEATURE (12)..(12): Xaa is alanine, valine, glycine, serine, or an amino acid residue which is covalently linked to another amino acid residue of the sequence
  MISC_FEATURE (13)..(13): Xaa is isoleucine, leucine, valine, phenylalanine, methionine, or an amino acid residue which is covalently linked to another amino acid residue of the sequence
  MISC_FEATURE (14)..(14): Xaa is isoleucine, leucine, valine, phenylalanine, methionine, or an amino acid residue which is covalently linked to another amino acid residue of the sequence
XXAEDXXXXXXXXXGLM

SEQ ID NO: 880 - protein, 16 aa, Artificial Sequence
  synthetic
  MISC_FEATURE (1)..(1): Xaa is phenylalanine, tyrosine, valine, leucine, isoleucine, methionine, or an amino acid residue which is covalently linked to another amino acid residue of the sequence
  MISC_FEATURE (5)..(5): Xaa is valine, leucine, isoleucine, alanine, methionine, or an amino acid residue which is covalently linked to another amino acid residue of the sequence
  MISC_FEATURE (6)..(6): Xaa is glycine, alanine, serine, or an amino acid residue which is covalently linked to another amino acid residue of the sequence
  MISC_FEATURE (7)..(7): Xaa is serine, glycine, alanine, threonine, or an amino acid residue which is covalently linked to another amino acid residue of the sequence
  MISC_FEATURE (8)..(8): Xaa is asparagine, glutamine, methionine, or an amino acid residue which is covalently linked to another amino acid residue of the sequence
  MISC_FEATURE (9)..(9): Xaa is lysine, arginine, or an amino acid residue which is covalently linked to another amino acid residue of the sequence
  MISC_FEATURE (10)..(10): Xaa is glycine, alanine, serine, or an amino acid residue which is covalently linked to another amino acid residue of the sequence
  MISC_FEATURE (11)..(11): Xaa is alanine, valine, glycine, serine, or an amino acid residue which is covalently linked to another amino acid residue of the sequence
  MISC_FEATURE (12)..(12): Xaa is isoleucine, leucine, valine, phenylalanine, methionine, or an amino acid residue which is covalently linked to another amino acid residue of the sequence
XAEDXXXXXXXXIGLM

SEQ ID NO: 881 - protein, 34 aa, Artificial Sequence
  synthetic
  MISC_FEATURE (17)..(17): Xaa is leucine, isoleucine, valine, phenylalanine, methionine, or an amino acid residue which is covalently linked to another amino acid residue of the sequence
  MISC_FEATURE (18)..(18): Xaa is valine, leucine, isoleucine, alanine, methionine, or an amino acid residue which is covalently linked to another amino acid residue of the sequence
  MISC_FEATURE (19)..(19): Xaa is phenylalanine, tyrosine, valine, leucine, isoleucine, methionine, or an amino acid residue which is covalently linked to another amino acid residue of the sequence
  MISC_FEATURE (20)..(20): Xaa is phenylalanine, tyrosine, valine, leucine, isoleucine, methionine, or an amino acid residue which is covalently linked to another amino acid residue of the sequence
  MISC_FEATURE (24)..(24): Xaa is valine, leucine, isoleucine, alanine, methionine, or an amino acid residue which is covalently linked to another amino acid residue of the sequence
  MISC_FEATURE (25)..(25): Xaa is glycine, alanine, serine, or an amino acid residue which is covalently linked to another amino acid residue of the sequence
  MISC_FEATURE (26)..(26): Xaa is serine, glycine, alanine, threonine, or an amino acid residue which is covalently linked to another amino acid residue of the sequence
  MISC_FEATURE (27)..(27): Xaa is asparagine, glutamine, methionine, or an amino acid residue which is covalently linked to another amino acid residue of the sequence
  MISC_FEATURE (28)..(28): Xaa is lysine, arginine, or an amino acid residue which is covalently linked to another amino acid residue of the sequence
  MISC_FEATURE (29)..(29): Xaa is glycine, alanine, serine, or an amino acid residue which is covalently linked to another amino acid residue of the sequence
  MISC_FEATURE (30)..(30): Xaa is alanine, valine, glycine, serine, or an amino acid residue which is covalently linked to another amino acid residue of the sequence
  MISC_FEATURE (31)..(31): Xaa is isoleucine, leucine, valine, phenylalanine, methionine, or an amino acid residue which is covalently linked to another amino acid residue of the sequence
  MISC_FEATURE (32)..(32): Xaa is isoleucine, leucine, valine, phenylalanine, methionine, or an amino acid residue which is covalently linked to another amino acid residue of the sequence
  MISC_FEATURE (33)..(33): Xaa is glycine, alanine, serine, or an amino acid residue which is covalently linked to another amino acid residue of the sequence
  MISC_FEATURE (34)..(34): Xaa is leucine, isoleucine, valine, phenylalanine, methionine, or an amino acid residue which is covalently linked to another amino acid residue of the sequence
DAEFRHDSGYEVHHQKXXXXAEDXXXXXXXXXXX

SEQ ID NO: 882 - protein, 33 aa, Artificial Sequence
  synthetic
  MISC_FEATURE (16)..(16): Xaa is leucine, isoleucine, valine, phenylalanine, methionine, or an amino acid residue which is covalently linked to another amino acid residue of the sequence
  MISC_FEATURE (17)..(17): Xaa is valine, leucine, isoleucine, alanine, methionine, or an amino acid residue which is covalently linked to another amino acid residue of the sequence
  MISC_FEATURE (18)..(18): Xaa is phenylalanine, tyrosine, valine, leucine, isoleucine, methionine, or an amino acid residue which is covalently linked to another amino acid residue of the sequence
  MISC_FEATURE (19)..(19): Xaa is phenylalanine, tyrosine, valine, leucine, isoleucine, methionine, or an amino acid residue which is covalently linked to another amino acid residue of the sequence
  MISC_FEATURE (23)..(23): Xaa is valine, leucine, isoleucine, alanine, methionine, or an amino acid residue which is covalently linked to another amino acid residue of the sequence
  MISC_FEATURE (24)..(24): Xaa is glycine, alanine, serine, or an amino acid residue which is covalently linked to another amino acid residue of the sequence
  MISC_FEATURE (25)..(25): Xaa is serine, glycine, alanine, threonine, or an amino acid residue which is covalently linked to another amino acid residue of the sequence
  MISC_FEATURE (26)..(26): Xaa is asparagine, glutamine, methionine, or an amino acid residue which is covalently linked to another amino acid residue of the sequence
  MISC_FEATURE (27)..(27): Xaa is lysine, arginine, or an amino acid residue which is covalently linked to another amino acid residue of the sequence
  MISC_FEATURE (28)..(28): Xaa is glycine, alanine, serine, or an amino acid residue which is covalently linked to another amino acid residue of the sequence
  MISC_FEATURE (29)..(29): Xaa is alanine, valine, glycine, serine, or an amino acid residue which is covalently linked to another amino acid residue of the sequence
  MISC_FEATURE (30)..(30): Xaa is isoleucine, leucine, valine, phenylalanine, methionine, or an amino acid residue which is covalently linked to another amino acid residue of the sequence
  MISC_FEATURE (31)..(31): Xaa is isoleucine, leucine, valine, phenylalanine, methionine, or an amino acid residue which is covalently linked to another amino acid residue of the sequence
  MISC_FEATURE (32)..(32): Xaa is glycine, alanine, serine, or an amino acid residue which is covalently linked to another amino acid residue of the sequence
  MISC_FEATURE (33)..(33): Xaa is leucine, isoleucine, valine, phenylalanine, methionine, or an amino acid residue which is covalently linked to another amino acid residue of the sequence
AEFRHDSGYEVHHQKXXXXAEDXXXXXXXXXXX

SEQ ID NO: 883 - protein, 32 aa, Artificial Sequence
  synthetic
  MISC_FEATURE (15)..(15): Xaa is leucine, isoleucine, valine, phenylalanine, methionine, or an amino acid residue which is covalently linked to another amino acid residue of the sequence
  MISC_FEATURE (16)..(16): Xaa is valine, leucine, isoleucine, alanine, methionine, or an amino acid residue which is covalently linked to another amino acid residue of the sequence
  MISC_FEATURE (17)..(17): Xaa is phenylalanine, tyrosine, valine, leucine, isoleucine, methionine, or an amino acid residue which is covalently linked to another amino acid residue of the sequence
  MISC_FEATURE (18)..(18): Xaa is phenylalanine, tyrosine, valine, leucine, isoleucine, methionine, or an amino acid residue which is covalently linked to another amino acid residue of the sequence
  MISC_FEATURE (22)..(22): Xaa is valine, leucine, isoleucine, alanine, methionine, or an amino acid residue which is covalently linked to another amino acid residue of the sequence
  MISC_FEATURE (23)..(23): Xaa is glycine, alanine, serine, or an amino acid residue which is covalently linked to another amino acid residue of the sequence
  MISC_FEATURE (24)..(24): Xaa is serine, glycine, alanine, threonine, or an amino acid residue which is covalently linked to another amino acid residue of the sequence
  MISC_FEATURE (25)..(25): Xaa is asparagine, glutamine, methionine, or an amino acid residue which is covalently linked to another amino acid residue of the sequence
  MISC_FEATURE (26)..(26): Xaa is lysine, arginine, or an amino acid residue which is covalently linked to another amino acid residue of the sequence
  MISC_FEATURE (27)..(27): Xaa is glycine, alanine, serine, or an amino acid residue which is covalently linked to another amino acid residue of the sequence
  MISC_FEATURE (28)..(28): Xaa is alanine, valine, glycine, serine, or an amino acid residue which is covalently linked to another amino acid residue of the sequence
  MISC_FEATURE (29)..(29): Xaa is isoleucine, leucine, valine, phenylalanine, methionine, or an amino acid residue which is covalently linked to another amino acid residue of the sequence
  MISC_FEATURE (30)..(30): Xaa is isoleucine, leucine, valine, phenylalanine, methionine, or an amino acid residue which is covalently linked to another amino acid residue of the sequence
  MISC_FEATURE (31)..(31): Xaa is glycine, alanine, serine, or an amino acid residue which is covalently linked to another amino acid residue of the sequence
  MISC_FEATURE (32)..(32): Xaa is leucine, isoleucine, valine, phenylalanine, methionine, or an amino acid residue which is covalently linked to another amino acid residue of the sequence
EFRHDSGYEVHHQKXXXXAEDXXXXXXXXXXX

SEQ ID NO: 884 - protein, 31 aa, Artificial Sequence
  synthetic
  MISC_FEATURE (14)..(14): Xaa is leucine, isoleucine, valine, phenylalanine, methionine, or an amino acid residue which is covalently linked to another amino acid residue of the sequence
  MISC_FEATURE (15)..(15): Xaa is valine, leucine, isoleucine, alanine, methionine, or an amino acid residue which is covalently linked to another amino acid residue of the sequence
  MISC_FEATURE (16)..(16): Xaa is phenylalanine, tyrosine, valine, leucine, isoleucine, methionine, or an amino acid residue which is covalently linked to another amino acid residue of the sequence
  MISC_FEATURE (17)..(17): Xaa is phenylalanine, tyrosine, valine, leucine, isoleucine, methionine, or an amino acid residue which is covalently linked to another amino acid residue of the sequence
  MISC_FEATURE (21)..(21): Xaa is valine, leucine, isoleucine, alanine, methionine, or an amino acid residue which is covalently linked to another amino acid residue of the sequence
  MISC_FEATURE (22)..(22): Xaa is glycine, alanine, serine, or an amino acid residue which is covalently linked to another amino acid residue of the sequence
  MISC_FEATURE (23)..(23): Xaa is serine, glycine, alanine, threonine, or an amino acid residue which is covalently linked to another amino acid residue of the sequence
  MISC_FEATURE (24)..(24): Xaa is asparagine, glutamine, methionine, or an amino acid residue which is covalently linked to another amino acid residue of the sequence
  MISC_FEATURE (25)..(25): Xaa is lysine, arginine, or an amino acid residue which is covalently linked to another amino acid residue of the sequence
  MISC_FEATURE (26)..(26): Xaa is glycine, alanine, serine, or an amino acid residue which is covalently linked to another amino acid residue of the sequence
  MISC_FEATURE (27)..(27): Xaa is alanine, valine, glycine, serine, or an amino acid residue which is covalently linked to another amino acid residue of the sequence
  MISC_FEATURE (28)..(28): Xaa is isoleucine, leucine, valine, phenylalanine, methionine, or an amino acid residue which is covalently linked to another amino acid residue of the sequence
  MISC_FEATURE (29)..(29): Xaa is isoleucine, leucine, valine, phenylalanine, methionine, or an amino acid residue which is covalently linked to another amino acid residue of the sequence
  MISC_FEATURE (30)..(30): Xaa is glycine, alanine, serine, or an amino acid residue which is covalently linked to another amino acid residue of the sequence
  MISC_FEATURE (31)..(31): Xaa is leucine, isoleucine, valine, phenylalanine, methionine, or an amino acid residue which is covalently linked to another amino acid residue of the sequence
FRHDSGYEVHHQKXXXXAEDXXXXXXXXXXX

SEQ ID NO: 885 - protein, 30 aa, Artificial Sequence
  synthetic
  MISC_FEATURE (13)..(13): Xaa is leucine, isoleucine, valine, phenylalanine, methionine, or an amino acid residue which is covalently linked to another amino acid residue of the sequence
  MISC_FEATURE (14)..(14): Xaa is valine, leucine, isoleucine, alanine, methionine, or an amino acid residue which is covalently linked to another amino acid residue of the sequence
  MISC_FEATURE (15)..(15): Xaa is phenylalanine, tyrosine, valine, leucine, isoleucine, methionine, or an amino acid residue which is covalently linked to another amino acid residue of the sequence
  MISC_FEATURE (16)..(16): Xaa is phenylalanine, tyrosine, valine, leucine, isoleucine, methionine, or an amino acid residue which is covalently linked to another amino acid residue of the sequence
  MISC_FEATURE (20)..(20): Xaa is valine, leucine, isoleucine, alanine, methionine, or an amino acid residue which is covalently linked to another amino acid residue of the sequence
  MISC_FEATURE (21)..(21): Xaa is glycine, alanine, serine, or an amino acid residue which is covalently linked to another amino acid residue of the sequence
  MISC_FEATURE (22)..(22): Xaa is serine, glycine, alanine, threonine, or an amino acid residue which is covalently linked to another amino acid residue of the sequence
  MISC_FEATURE (23)..(23): Xaa is asparagine, glutamine, methionine, or an amino acid residue which is covalently linked to another amino acid residue of the sequence
  MISC_FEATURE (24)..(24): Xaa is lysine, arginine, or an amino acid residue which is covalently linked to another amino acid residue of the sequence
  MISC_FEATURE (25)..(25): Xaa is glycine, alanine, serine, or an amino acid residue which is covalently linked to another amino acid residue of the sequence
  MISC_FEATURE (26)..(26): Xaa is alanine, valine, glycine, serine, or an amino acid residue which is covalently linked to another amino acid residue of the sequence
  MISC_FEATURE (27)..(27): Xaa is isoleucine, leucine, valine, phenylalanine, methionine, or an amino acid residue which is covalently linked to another amino acid residue of the sequence
  MISC_FEATURE (28)..(28): Xaa is isoleucine, leucine, valine, phenylalanine, methionine, or an amino acid residue which is covalently linked to another amino acid residue of the sequence
  MISC_FEATURE (29)..(29): Xaa is glycine, alanine, serine, or an amino acid residue which is covalently linked to another amino acid residue of the sequence
  MISC_FEATURE (30)..(30): Xaa is leucine, isoleucine, valine, phenylalanine, methionine, or an amino acid residue which is covalently linked to another amino acid residue of the sequence
RHDSGYEVHHQKXXXXAEDXXXXXXXXXXX

SEQ ID NO: 886 - protein, 29 aa, Artificial Sequence
  synthetic
  MISC_FEATURE (12)..(12): Xaa is leucine, isoleucine, valine, phenylalanine, methionine, or an amino acid residue which is covalently linked to another amino acid residue of the sequence
  MISC_FEATURE (13)..(13): Xaa is valine, leucine, isoleucine, alanine, methionine, or an amino acid residue which is covalently linked to another amino acid residue of the sequence
  MISC_FEATURE (14)..(14): Xaa is phenylalanine, tyrosine, valine, leucine, isoleucine, methionine, or an amino acid residue which is covalently linked to another amino acid residue of the sequence
  MISC_FEATURE (15)..(15): Xaa is phenylalanine, tyrosine, valine, leucine, isoleucine, methionine, or an amino acid residue which is covalently linked to another amino acid residue of the sequence
  MISC_FEATURE (19)..(19): Xaa is valine, leucine, isoleucine, alanine, methionine, or an amino acid residue which is covalently linked to another amino acid residue of the sequence
  MISC_FEATURE (20)..(20): Xaa is glycine, alanine, serine, or an amino acid residue which is covalently linked to another amino acid residue of the sequence
  MISC_FEATURE (21)..(21): Xaa is serine, glycine, alanine, threonine, or an amino acid residue which is covalently linked to another amino acid residue of the sequence
  MISC_FEATURE (22)..(22): Xaa is asparagine, glutamine, methionine, or an amino acid residue which is covalently linked to another amino acid residue of the sequence
  MISC_FEATURE (23)..(23): Xaa is lysine, arginine, or an amino acid residue which is covalently linked to another amino acid residue of the sequence
  MISC_FEATURE (24)..(24): Xaa is glycine, alanine, serine, or an amino acid residue which is covalently linked to another amino acid residue of the sequence
  MISC_FEATURE (25)..(25): Xaa is alanine, valine, glycine, serine, or an amino acid residue which is covalently linked to another amino acid residue of the sequence
  MISC_FEATURE (26)..(26): Xaa is isoleucine, leucine, valine, phenylalanine, methionine, or an amino acid residue which is covalently linked to another amino acid residue of the sequence
  MISC_FEATURE (27)..(27): Xaa is isoleucine, leucine, valine, phenylalanine, methionine, or an amino acid residue which is covalently linked to another amino acid residue of the sequence
  MISC_FEATURE (28)..(28): Xaa is glycine, alanine, serine, or an amino acid residue which is covalently linked to another amino acid residue of the sequence
  MISC_FEATURE (29)..(29): Xaa is leucine, isoleucine, valine, phenylalanine, methionine, or an amino acid residue which is covalently linked to another amino acid residue of the sequence
HDSGYEVHHQKXXXXAEDXXXXXXXXXXX

SEQ ID NO: 887 - protein, 28 aa, Artificial Sequence
  synthetic
  MISC_FEATURE (11)..(11): Xaa is leucine, isoleucine, valine, phenylalanine, methionine, or an amino acid residue which is covalently linked to another amino acid residue of the sequence
  MISC_FEATURE (12)..(12): Xaa is valine, leucine, isoleucine, alanine, methionine, or an amino acid residue which is covalently linked to another amino acid residue of the sequence
  MISC_FEATURE (13)..(13): Xaa is phenylalanine, tyrosine, valine, leucine, isoleucine, methionine, or an amino acid residue which is covalently linked to another amino acid residue of the sequence
  MISC_FEATURE (14)..(14): Xaa is phenylalanine, tyrosine, valine, leucine, isoleucine, methionine, or an amino acid residue which is covalently linked to another amino acid residue of the sequence
  MISC_FEATURE (18)..(18): Xaa is valine, leucine, isoleucine, alanine, methionine, or an amino acid residue which is covalently linked to another amino acid residue of the sequence
  MISC_FEATURE (19)..(19): Xaa is glycine, alanine, serine, or an amino acid residue which is covalently linked to another amino acid residue of the sequence
  MISC_FEATURE (20)..(20): Xaa is serine, glycine, alanine, threonine, or an amino acid residue which is covalently linked to another amino acid residue of the sequence
  MISC_FEATURE (21)..(21): Xaa is asparagine, glutamine, methionine, or an amino acid residue which is covalently linked to another amino acid residue of the sequence
  MISC_FEATURE (22)..(22): Xaa is lysine, arginine, or an amino acid residue which is covalently linked to another amino acid residue of the sequence
  MISC_FEATURE (23)..(23): Xaa is glycine, alanine, serine, or an amino acid residue which is covalently linked to another amino acid residue of the sequence
  MISC_FEATURE (24)..(24): Xaa is alanine, valine, glycine, serine, or an amino acid residue which is covalently linked to another amino acid residue of the sequence
  MISC_FEATURE (25)..(25): Xaa is isoleucine, leucine, valine, phenylalanine, methionine, or an amino acid residue which is covalently linked to another amino acid residue of the sequence
  MISC_FEATURE (26)..(26): Xaa is isoleucine, leucine, valine, phenylalanine, methionine, or an amino acid residue which is covalently linked to another amino acid residue of the sequence
  MISC_FEATURE (27)..(27): Xaa is glycine, alanine, serine, or an amino acid residue which is covalently linked to another amino acid residue of the sequence
  MISC_FEATURE (28)..(28): Xaa is leucine, isoleucine, valine, phenylalanine, methionine, or an amino acid residue which is covalently linked to another amino acid residue of the sequence
DSGYEVHHQKXXXXAEDXXXXXXXXXXX

SEQ ID NO: 888 - protein, 27 aa, Artificial Sequence
  synthetic
  MISC_FEATURE (10)..(10): Xaa is leucine, isoleucine, valine, phenylalanine, methionine, or an amino acid residue which is covalently linked to another amino acid residue of the sequence
  MISC_FEATURE (11)..(11): Xaa is valine, leucine, isoleucine, alanine, methionine, or an amino acid residue which is covalently linked to another amino acid residue of the sequence
  MISC_FEATURE (12)..(12): Xaa is phenylalanine, tyrosine, valine, leucine, isoleucine, methionine, or an amino acid residue which is covalently linked to another amino acid residue of the sequence
  MISC_FEATURE (13)..(13): Xaa is phenylalanine, tyrosine, valine, leucine, isoleucine, methionine, or an amino acid residue which is covalently linked to another amino acid residue of the sequence
  MISC_FEATURE (17)..(17): Xaa is valine, leucine, isoleucine, alanine, methionine, or an amino acid residue which is covalently linked to another amino acid residue of the sequence
  MISC_FEATURE (18)..(18): Xaa is glycine, alanine, serine, or an amino acid residue which is covalently linked to another amino acid residue of the sequence
  MISC_FEATURE (19)..(19): Xaa is serine, glycine, alanine, threonine, or an amino acid residue which is covalently linked to another amino acid residue of the sequence
  MISC_FEATURE (20)..(20): Xaa is asparagine, glutamine, methionine, or an amino acid residue which is covalently linked to another amino acid residue of the sequence
  MISC_FEATURE (21)..(21): Xaa is lysine, arginine, or an amino acid residue which is covalently linked to another amino acid residue of the sequence
  MISC_FEATURE (22)..(22): Xaa is glycine, alanine, serine, or an amino acid residue which is covalently linked to another amino acid residue of the sequence
  MISC_FEATURE (23)..(23): Xaa is alanine, valine, glycine, serine, or an amino acid residue which is covalently linked to another amino acid residue of the sequence
  MISC_FEATURE (24)..(24): Xaa is isoleucine, leucine, valine, phenylalanine, methionine, or an amino acid residue which is covalently linked to another amino acid residue of the sequence
  MISC_FEATURE (25)..(25): Xaa is isoleucine, leucine, valine, phenylalanine, methionine, or an amino acid residue which is covalently linked to another amino acid residue of the sequence
  MISC_FEATURE (26)..(26): Xaa is glycine, alanine, serine, or an amino acid residue which is covalently linked to another amino acid residue of the sequence
  MISC_FEATURE (27)..(27): Xaa is leucine, isoleucine, valine, phenylalanine, methionine, or an amino acid residue which is covalently linked to another amino acid residue of the sequence
SGYEVHHQKXXXXAEDXXXXXXXXXXX

SEQ ID NO: 889 - protein, 26 aa, Artificial Sequence
  synthetic
  MISC_FEATURE (9)..(9): Xaa is leucine, isoleucine, valine, phenylalanine, methionine, or an amino acid residue which is covalently linked to another amino acid residue of the sequence
  MISC_FEATURE (10)..(10): Xaa is valine, leucine, isoleucine, alanine, methionine, or an amino acid residue which is covalently linked to another amino acid residue of the sequence
  MISC_FEATURE (11)..(11): Xaa is phenylalanine, tyrosine, valine, leucine, isoleucine, methionine, or an amino acid residue which is covalently linked to another amino acid residue of the sequence
  MISC_FEATURE (12)..(12): Xaa is phenylalanine, tyrosine, valine, leucine, isoleucine, methionine, or an amino acid residue which is covalently linked to another amino acid residue of the sequence
  MISC_FEATURE (16)..(16): Xaa is valine, leucine, isoleucine, alanine, methionine, or an amino acid residue which is covalently linked to another amino acid residue of the sequence
  MISC_FEATURE (17)..(17): Xaa is glycine, alanine, serine, or an amino acid residue which is covalently linked to another amino acid residue of the sequence
  MISC_FEATURE (18)..(18): Xaa is serine, glycine, alanine, threonine, or an amino acid residue which is covalently linked to another amino acid residue of the sequence
  MISC_FEATURE (19)..(19): Xaa is asparagine, glutamine, methionine, or an amino acid residue which is covalently linked to another amino acid residue of the sequence
  MISC_FEATURE (20)..(20): Xaa is lysine, arginine, or an amino acid residue which is covalently linked to another amino acid residue of the sequence
  MISC_FEATURE (21)..(21): Xaa is glycine, alanine, serine, or an amino acid residue which is covalently linked to another amino acid residue of the sequence
  MISC_FEATURE (22)..(22): Xaa is alanine, valine, glycine, serine, or an amino acid residue which is covalently linked to another amino acid residue of the sequence
  MISC_FEATURE (23)..(23): Xaa is isoleucine, leucine, valine, phenylalanine, methionine, or an amino acid residue which is covalently linked to another amino acid residue of the sequence
  MISC_FEATURE (24)..(24): Xaa is isoleucine, leucine, valine, phenylalanine, methionine, or an amino acid residue which is covalently linked to another amino acid residue of the sequence
  MISC_FEATURE (25)..(25): Xaa is glycine, alanine, serine, or an amino acid residue which is covalently linked to another amino acid residue of the sequence
  MISC_FEATURE (26)..(26): Xaa is leucine, isoleucine, valine, phenylalanine, methionine, or an amino acid residue which is covalently linked to another amino acid residue of the sequence
GYEVHHQKXXXXAEDXXXXXXXXXXX

SEQ ID NO: 890 - protein, 25 aa, Artificial Sequence
  synthetic
  MISC_FEATURE (8)..(8): Xaa is leucine, isoleucine, valine, phenylalanine, methionine, or an amino acid residue which is covalently linked to another amino acid residue of the sequence
  MISC_FEATURE (9)..(9): Xaa is valine, leucine, isoleucine, alanine, methionine, or an amino acid residue which is covalently linked to another amino acid residue of the sequence
  MISC_FEATURE (10)..(10): Xaa is phenylalanine, tyrosine, valine, leucine, isoleucine, methionine, or an amino acid residue which is covalently linked to another amino acid residue of the sequence
  MISC_FEATURE (11)..(11): Xaa is phenylalanine, tyrosine, valine, leucine, isoleucine, methionine, or an amino acid residue which is covalently linked to another amino acid residue of the sequence
  MISC_FEATURE (15)..(15): Xaa is valine, leucine, isoleucine, alanine, methionine, or an amino acid residue which is covalently linked to another amino acid residue of the sequence
  MISC_FEATURE (16)..(16): Xaa is glycine, alanine, serine, or an amino acid residue which is covalently linked to another amino acid residue of the sequence
  MISC_FEATURE (17)..(17): Xaa is serine, glycine, alanine, threonine, or an amino acid residue which is covalently linked to another amino acid residue of the sequence
  MISC_FEATURE (18)..(18): Xaa is asparagine, glutamine, methionine, or an amino acid residue which is covalently linked to another amino acid residue of the sequence
  MISC_FEATURE (19)..(19): Xaa is lysine, arginine, or an amino acid residue which is covalently linked to another amino acid residue of the sequence
  MISC_FEATURE (20)..(20): Xaa is glycine, alanine, serine, or an amino acid residue which is covalently linked to another amino acid residue of the sequence
  MISC_FEATURE (21)..(21): Xaa is alanine, valine, glycine, serine, or an amino acid residue which is covalently linked to another amino acid residue of the sequence
  MISC_FEATURE (22)..(22): Xaa is isoleucine, leucine, valine, phenylalanine, methionine, or an amino acid residue which is covalently linked to another amino acid residue of the sequence
  MISC_FEATURE (23)..(23): Xaa is isoleucine, leucine, valine, phenylalanine, methionine, or an amino acid residue which is covalently linked to another amino acid residue of the sequence
  MISC_FEATURE (24)..(24): Xaa is glycine, alanine, serine, or an amino acid residue which is covalently linked to another amino acid residue of the sequence
  MISC_FEATURE (25)..(25): Xaa is leucine, isoleucine, valine, phenylalanine, methionine, or an amino acid residue which is covalently linked to another amino acid residue of the sequence
YEVHHQKXXXXAEDXXXXXXXXXXX

SEQ ID NO: 891 - protein, 24 aa, Artificial Sequence
  synthetic
  MISC_FEATURE (7)..(7): Xaa is leucine, isoleucine, valine, phenylalanine, methionine, or an amino acid residue which is covalently linked to another amino acid residue of the sequence
  MISC_FEATURE (8)..(8): Xaa is valine, leucine, isoleucine, alanine, methionine, or an amino acid residue which is covalently linked to another amino acid residue of the sequence
  MISC_FEATURE (9)..(9): Xaa is phenylalanine, tyrosine, valine, leucine, isoleucine, methionine, or an amino acid residue which is covalently linked to another amino acid residue of the sequence
  MISC_FEATURE (10)..(10): Xaa is phenylalanine, tyrosine, valine, leucine, isoleucine, methionine, or an amino acid residue which is covalently linked to another amino acid residue of the sequence
  MISC_FEATURE (14)..(14): Xaa is valine, leucine, isoleucine, alanine, methionine, or an amino acid residue which is covalently linked to another amino acid residue of the sequence
  MISC_FEATURE (15)..(15): Xaa is glycine, alanine, serine, or an amino acid residue which is covalently linked to another amino acid residue of the sequence
  MISC_FEATURE (16)..(16): Xaa is serine, glycine, alanine, threonine, or an amino acid residue which is covalently linked to another amino acid residue of the sequence
  MISC_FEATURE (17)..(17): Xaa is asparagine, glutamine, methionine, or an amino acid residue which is covalently linked to another amino acid residue of the sequence
  MISC_FEATURE (18)..(18): Xaa is lysine, arginine, or an amino acid residue which is covalently linked to another amino acid residue of the sequence
  MISC_FEATURE (19)..(19): Xaa is glycine, alanine, serine, or an amino acid residue which is covalently linked to another amino acid residue of the sequence
  MISC_FEATURE (20)..(20): Xaa is alanine, valine, glycine, serine, or an amino acid residue which is covalently linked to another amino acid residue of the sequence
  MISC_FEATURE (21)..(21): Xaa is isoleucine, leucine, valine, phenylalanine, methionine, or an amino acid residue which is covalently linked to another amino acid residue of the sequence
  MISC_FEATURE (22)..(22): Xaa is isoleucine, leucine, valine, phenylalanine, methionine, or an amino acid residue which is covalently linked to another amino acid residue of the sequence
  MISC_FEATURE (23)..(23): Xaa is glycine, alanine, serine, or an amino acid residue which is covalently linked to another amino acid residue of the sequence
  MISC_FEATURE (24)..(24): Xaa is leucine, isoleucine, valine, phenylalanine, methionine, or an amino acid residue which is covalently linked to another amino acid residue of the sequence
EVHHQKXXXXAEDXXXXXXXXXXX

SEQ ID NO: 892 - protein, 23 aa, Artificial Sequence
  synthetic
  MISC_FEATURE (6)..(6): Xaa is leucine, isoleucine, valine, phenylalanine, methionine, or an amino acid residue which is covalently linked to another amino acid residue of the sequence
  MISC_FEATURE (7)..(7): Xaa is valine, leucine, isoleucine, alanine, methionine, or an amino acid residue which is covalently linked to another amino acid residue of the sequence
  MISC_FEATURE (8)..(8): Xaa is phenylalanine, tyrosine, valine, leucine, isoleucine, methionine, or an amino acid residue which is covalently linked to another amino acid residue of the sequence
  MISC_FEATURE (9)..(9): Xaa is phenylalanine, tyrosine, valine, leucine, isoleucine, methionine, or an amino acid residue which is covalently linked to another amino acid residue of the sequence
  MISC_FEATURE (13)..(13): Xaa is valine, leucine, isoleucine, alanine, methionine, or an amino acid residue which is covalently linked to another amino acid residue of the sequence
  MISC_FEATURE (14)..(14): Xaa is glycine, alanine, serine, or an amino acid residue which is covalently linked to another amino acid residue of the sequence
  MISC_FEATURE (15)..(15): Xaa is serine, glycine, alanine, threonine, or an amino acid residue which is covalently linked to another amino acid residue of the sequence
  MISC_FEATURE (16)..(16): Xaa is asparagine, glutamine, methionine, or an amino acid residue which is covalently linked to another amino acid residue of the sequence
  MISC_FEATURE (17)..(17): Xaa is lysine, arginine, or an amino acid residue which is covalently linked to another amino acid residue of the sequence
  MISC_FEATURE (18)..(18): Xaa is glycine, alanine, serine, or an amino acid residue which is covalently linked to another amino acid residue of the sequence
  MISC_FEATURE (19)..(19): Xaa is alanine, valine, glycine, serine, or an amino acid residue which is covalently linked to another amino acid residue of the sequence
  MISC_FEATURE (20)..(20): Xaa is isoleucine, leucine, valine, phenylalanine, methionine, or an amino acid residue which is covalently linked to another amino acid residue of the sequence
  MISC_FEATURE (21)..(21): Xaa is isoleucine, leucine, valine, phenylalanine, methionine, or an amino acid residue which is covalently linked to another amino acid residue of the sequence
  MISC_FEATURE (22)..(22): Xaa is glycine, alanine, serine, or an amino acid residue which is covalently linked to another amino acid residue of the sequence
  MISC_FEATURE (23)..(23): Xaa is leucine, isoleucine, valine, phenylalanine, methionine, or an amino acid residue which is covalently linked to another amino acid residue of the sequence
VHHQKXXXXAEDXXXXXXXXXXX

SEQ ID NO: 893 - protein, 22 aa, Artificial Sequence
  synthetic
  MISC_FEATURE (5)..(5): Xaa is leucine, isoleucine, valine, phenylalanine, methionine, or an amino acid residue which is covalently linked to another amino acid residue of the sequence
  MISC_FEATURE (6)..(6): Xaa is valine, leucine, isoleucine, alanine, methionine, or an amino acid residue which is covalently linked to another amino acid residue of the sequence
  MISC_FEATURE (7)..(7): Xaa is phenylalanine, tyrosine, valine, leucine, isoleucine, methionine, or an amino acid residue which is covalently linked to another amino acid residue of the sequence
  MISC_FEATURE (8)..(8): Xaa is phenylalanine, tyrosine, valine, leucine, isoleucine, methionine, or an amino acid residue which is covalently linked to another amino acid residue of the sequence
  MISC_FEATURE (12)..(12): Xaa is valine, leucine, isoleucine, alanine, methionine, or an amino acid residue which is covalently linked to another amino acid residue of the sequence
  MISC_FEATURE (13)..(13): Xaa is glycine, alanine, serine, or an amino acid residue which is covalently linked to another amino acid residue of the sequence
  MISC_FEATURE (14)..(14): Xaa is serine, glycine, alanine, threonine, or an amino acid residue which is covalently linked to another amino acid residue of the sequence
  MISC_FEATURE (15)..(15): Xaa is asparagine, glutamine, methionine, or an amino acid residue which is covalently linked to another amino acid residue of the sequence
  MISC_FEATURE (16)..(16): Xaa is lysine, arginine, or an amino acid residue which is covalently linked to another amino acid residue of the sequence
  MISC_FEATURE (17)..(17): Xaa is glycine, alanine, serine, or an amino acid residue which is covalently linked to another amino acid residue of the sequence
  MISC_FEATURE (18)..(18): Xaa is alanine, valine, glycine, serine, or an amino acid residue which is covalently linked to another amino acid residue of the sequence
  MISC_FEATURE (19)..(19): Xaa is isoleucine, leucine, valine, phenylalanine, methionine, or an amino acid residue which is covalently linked to another amino acid residue of the sequence
  MISC_FEATURE (20)..(20): Xaa is isoleucine, leucine, valine, phenylalanine, methionine, or an amino acid residue which is covalently linked to another amino acid residue of the sequence
  MISC_FEATURE (21)..(21): Xaa is glycine, alanine, serine, or an amino acid residue which is covalently linked to another amino acid residue of the sequence
  MISC_FEATURE (22)..(22): Xaa is leucine, isoleucine, valine, phenylalanine, methionine, or an amino acid residue which is covalently linked to another amino acid residue of the sequence
HHQKXXXXAEDXXXXXXXXXXX

SEQ ID NO: 894 - protein, 21 aa, Artificial Sequence
  synthetic
  MISC_FEATURE (4)..(4): Xaa is leucine, isoleucine, valine, phenylalanine, methionine, or an amino acid residue which is covalently linked to another amino acid residue of the sequence
  MISC_FEATURE (5)..(5): Xaa is valine, leucine, isoleucine, alanine, methionine, or an amino acid residue which is covalently linked to another amino acid residue of the sequence
  MISC_FEATURE (6)..(6): Xaa is phenylalanine, tyrosine, valine, leucine, isoleucine, methionine, or an amino acid residue which is covalently linked to another amino acid residue of the sequence
  MISC_FEATURE (7)..(7): Xaa is phenylalanine, tyrosine, valine, leucine, isoleucine, methionine, or an amino acid residue which is covalently linked to another amino acid residue of the sequence
  MISC_FEATURE (11)..(11): Xaa is valine, leucine, isoleucine, alanine, methionine, or an amino acid residue which is covalently linked to another amino acid residue of the sequence
  MISC_FEATURE (12)..(12): Xaa is glycine, alanine, serine, or an amino acid residue which is covalently linked to another amino acid residue of the sequence
  MISC_FEATURE (13)..(13): Xaa is serine, glycine, alanine, threonine, or an amino acid residue which is covalently linked to another amino acid residue of the sequence
  MISC_FEATURE (14)..(14): Xaa is asparagine, glutamine, methionine, or an amino acid residue which is covalently linked to another amino acid residue of the sequence
  MISC_FEATURE (15)..(15): Xaa is lysine, arginine, or an amino acid residue which is covalently linked to another amino acid residue of the sequence
  MISC_FEATURE (16)..(16): Xaa is glycine, alanine, serine, or an amino acid residue which is covalently linked to another amino acid residue of the sequence
  MISC_FEATURE (17)..(17): Xaa is alanine, valine, glycine, serine, or an amino acid residue which is covalently linked to another amino acid residue of the sequence
  MISC_FEATURE (18)..(18): Xaa is isoleucine, leucine, valine, phenylalanine, methionine, or an amino acid residue which is covalently linked to another amino acid residue of the sequence
  MISC_FEATURE (19)..(19): Xaa is isoleucine, leucine, valine, phenylalanine, methionine, or an amino acid residue which is covalently linked to another amino acid residue of the sequence
  MISC_FEATURE (20)..(20): Xaa is glycine, alanine, serine, or an amino acid residue which is covalently linked to another amino acid residue of the sequence
  MISC_FEATURE (21)..(21): Xaa is leucine, isoleucine, valine, phenylalanine, methionine, or an amino acid residue which is covalently linked to another amino acid residue of the sequence
HQKXXXXAEDXXXXXXXXXXX

SEQ ID NO: 895 - protein, 20 aa, Artificial Sequence
  synthetic
  MISC_FEATURE (3)..(3): Xaa is leucine, isoleucine, valine, phenylalanine, methionine, or an amino acid residue which is covalently linked to another amino acid residue of the sequence
  MISC_FEATURE (4)..(4): Xaa is valine, leucine, isoleucine, alanine, methionine, or an amino acid residue which is covalently linked to another amino acid residue of the sequence
  MISC_FEATURE (5)..(5): Xaa is phenylalanine, tyrosine, valine, leucine, isoleucine, methionine, or an amino acid residue which is covalently linked to another amino acid residue of the sequence
  MISC_FEATURE (6)..(6): Xaa is phenylalanine, tyrosine, valine, leucine, isoleucine, methionine, or an amino acid residue which is covalently linked to another amino acid residue of the sequence
  MISC_FEATURE (10)..(10): Xaa is valine, leucine, isoleucine, alanine, methionine, or an amino acid residue which is covalently linked to another amino acid residue of the sequence
  MISC_FEATURE (11)..(11): Xaa is glycine, alanine, serine, or an amino acid residue which is covalently linked to another amino acid residue of the sequence
  MISC_FEATURE (12)..(12): Xaa is serine, glycine, alanine, threonine, or an amino acid residue which is covalently linked to another amino acid residue of the sequence
  MISC_FEATURE (13)..(13): Xaa is asparagine, glutamine, methionine, or an amino acid residue which is covalently linked to another amino acid residue of the sequence
  MISC_FEATURE (14)..(14): Xaa is lysine, arginine, or an amino acid residue which is covalently linked to another amino acid residue of the sequence
  MISC_FEATURE (15)..(15): Xaa is glycine, alanine, serine, or an amino acid residue which is covalently linked to another amino acid residue of the sequence
  MISC_FEATURE (16)..(16): Xaa is alanine, valine, glycine, serine, or an amino acid residue which is covalently linked to another amino acid residue of the sequence
  MISC_FEATURE (17)..(17): Xaa is isoleucine, leucine, valine, phenylalanine, methionine, or an amino acid residue which is covalently linked to another amino acid residue of the sequence
  MISC_FEATURE (18)..(18): Xaa is isoleucine, leucine, valine, phenylalanine, methionine, or an amino acid residue which is covalently linked to another amino acid residue of the sequence
  MISC_FEATURE (19)..(19): Xaa is glycine, alanine, serine, or an amino acid residue which is covalently linked to another amino acid residue of the sequence
  MISC_FEATURE (20)..(20): Xaa is leucine, isoleucine, valine, phenylalanine, methionine, or an amino acid residue which is covalently linked to another amino acid residue of the sequence
QKXXXXAEDXXXXXXXXXXX

SEQ ID NO: 896 - protein, 19 aa, Artificial Sequence
  synthetic
  MISC_FEATURE (2)..(2): Xaa is leucine, isoleucine, valine, phenylalanine, methionine, or an amino acid residue which is covalently linked to another amino acid residue of the sequence
  MISC_FEATURE (3)..(3): Xaa is valine, leucine, isoleucine, alanine, methionine, or an amino acid residue which is covalently linked to another amino acid residue of the sequence
  MISC_FEATURE (4)..(4): Xaa is phenylalanine, tyrosine, valine, leucine, isoleucine, methionine, or an amino acid residue which is covalently linked to another amino acid residue of the sequence
  MISC_FEATURE (5)..(5): Xaa is phenylalanine, tyrosine, valine, leucine, isoleucine, methionine, or an amino acid residue which is covalently linked to another amino acid residue of the sequence
  MISC_FEATURE (9)..(9): Xaa is valine, leucine, isoleucine, alanine, methionine, or an amino acid residue which is covalently linked to another amino acid residue of the sequence
  MISC_FEATURE (10)..(10): Xaa is glycine, alanine, serine, or an amino acid residue which is covalently linked to another amino acid residue of the sequence
  MISC_FEATURE (11)..(11): Xaa is serine, glycine, alanine, threonine, or an amino acid residue which is covalently linked to another amino acid residue of the sequence
  MISC_FEATURE (12)..(12): Xaa is asparagine, glutamine, methionine, or an amino acid residue which is covalently linked to another amino acid residue of the sequence
  MISC_FEATURE (13)..(13): Xaa is lysine, arginine, or an amino acid residue which is covalently linked to another amino acid residue of the sequence
  MISC_FEATURE (14)..(14): Xaa is glycine, alanine, serine, or an amino acid residue which is covalently linked to another amino acid residue of the sequence
  MISC_FEATURE (15)..(15): Xaa is alanine, valine, glycine, serine, or an amino acid residue which is covalently linked to another amino acid residue of the sequence
  MISC_FEATURE (16)..(16): Xaa is isoleucine, leucine, valine, phenylalanine, methionine, or an amino acid residue which is covalently linked to another amino acid residue of the sequence
  MISC_FEATURE (17)..(17): Xaa is isoleucine, leucine, valine, phenylalanine, methionine, or an amino acid residue which is covalently linked to another amino acid residue of the sequence
  MISC_FEATURE (18)..(18): Xaa is glycine, alanine, serine, or an amino acid residue which is covalently linked to another amino acid residue of the sequence
  MISC_FEATURE (19)..(19): Xaa is leucine, isoleucine, valine, phenylalanine, methionine, or an amino acid residue which is covalently linked to another amino acid residue of the sequence
KXXXXAEDXXXXXXXXXXX

SEQ ID NO: 897 - protein, 18 aa, Artificial Sequence
  synthetic
  MISC_FEATURE (1)..(1): Xaa is leucine, isoleucine, valine, phenylalanine, methionine, or an amino acid residue which is covalently linked to another amino acid residue of the sequence
  MISC_FEATURE (2)..(2): Xaa is valine, leucine, isoleucine, alanine, methionine, or an amino acid residue which is covalently linked to another amino acid residue of the sequence
  MISC_FEATURE (3)..(3): Xaa is phenylalanine, tyrosine, valine, leucine, isoleucine, methionine, or an amino acid residue which is covalently linked to another amino acid residue of the sequence
  MISC_FEATURE (4)..(4): Xaa is phenylalanine, tyrosine, valine, leucine, isoleucine, methionine, or an amino acid residue which is covalently linked to another amino acid residue of the sequence
  MISC_FEATURE (8)..(8): Xaa is valine, leucine, isoleucine, alanine, methionine, or an amino acid residue which is covalently linked to another amino acid residue of the sequence
  MISC_FEATURE (9)..(9): Xaa is glycine, alanine, serine, or an amino acid residue which is covalently linked to another amino acid residue of the sequence
  MISC_FEATURE (10)..(10): Xaa is serine, glycine, alanine, threonine, or an amino acid residue which is covalently linked to another amino acid residue of the sequence
  MISC_FEATURE (11)..(11): Xaa is asparagine, glutamine, methionine, or an amino acid residue which is covalently linked to another amino acid residue of the sequence
  MISC_FEATURE (12)..(12): Xaa is lysine, arginine, or an amino acid residue which is covalently linked to another amino acid residue of the sequence
  MISC_FEATURE (13)..(13): Xaa is glycine, alanine, serine, or an amino acid residue which is covalently linked to another amino acid residue of the sequence
  MISC_FEATURE (14)..(14): Xaa is alanine, valine, glycine, serine, or an amino acid residue which is covalently linked to another amino acid residue of the sequence
  MISC_FEATURE (15)..(15): Xaa is isoleucine, leucine, valine, phenylalanine, methionine, or an amino acid residue which is covalently linked to another amino acid residue of the sequence
  MISC_FEATURE (16)..(16): Xaa is isoleucine, leucine, valine, phenylalanine, methionine, or an amino acid residue which is covalently linked to another amino acid residue of the sequence
  MISC_FEATURE (17)..(17): Xaa is glycine, alanine, serine, or an amino acid residue which is covalently linked to another amino acid residue of the sequence
  MISC_FEATURE (18)..(18): Xaa is leucine, isoleucine, valine, phenylalanine, methionine, or an amino acid residue which is covalently linked to another amino acid residue of the sequence
XXXXAEDXXXXXXXXXXX

SEQ ID NO: 898 - protein, 17 aa, Artificial Sequence
  synthetic
  MISC_FEATURE (1)..(1): Xaa is valine, leucine, isoleucine, alanine, methionine, or an amino acid residue which is covalently linked to another amino acid residue of the sequence
  MISC_FEATURE (2)..(2): Xaa is phenylalanine, tyrosine, valine, leucine, isoleucine, methionine, or an amino acid residue which is covalently linked to another amino acid residue of the sequence
  MISC_FEATURE (3)..(3): Xaa is phenylalanine, tyrosine, valine, leucine, isoleucine, methionine, or an amino acid residue which is covalently linked to another amino acid residue of the sequence
  MISC_FEATURE (7)..(7): Xaa is valine, leucine, isoleucine, alanine, methionine, or an amino acid residue which is covalently linked to another amino acid residue of the sequence
  MISC_FEATURE (8)..(8): Xaa is glycine, alanine, serine, or an amino acid residue which is covalently linked to another amino acid residue of the sequence
  MISC_FEATURE (9)..(9): Xaa is serine, glycine, alanine, threonine, or an amino acid residue which is covalently linked to another amino acid residue of the sequence
  MISC_FEATURE (10)..(10): Xaa is asparagine, glutamine, methionine, or an amino acid residue which is covalently linked to another amino acid residue of the sequence
  MISC_FEATURE (11)..(11): Xaa is lysine, arginine, or an amino acid residue which is covalently linked to another amino acid residue of the sequence
  MISC_FEATURE (12)..(12): Xaa is glycine, alanine, serine, or an amino acid residue which is covalently linked to another amino acid residue of the sequence
  MISC_FEATURE (13)..(13): Xaa is alanine, valine, glycine, serine, or an amino acid residue which is covalently linked to another amino acid residue of the sequence
  MISC_FEATURE (14)..(14): Xaa is isoleucine, leucine, valine, phenylalanine, methionine, or an amino acid residue which is covalently linked to another amino acid residue of the sequence
  MISC_FEATURE (15)..(15): Xaa is isoleucine, leucine, valine, phenylalanine, methionine, or an amino acid residue which is covalently linked to another amino acid residue of the sequence
  MISC_FEATURE (16)..(16): Xaa is glycine, alanine, serine, or an amino acid residue which is covalently linked to another amino acid residue of the sequence
XXXAEDXXXXXXXXXXL

SEQ ID NO: 899 - protein, 16 aa, Artificial Sequence
  synthetic
  MISC_FEATURE (1)..(1): Xaa is phenylalanine, tyrosine, valine, leucine, isoleucine, methionine, or an amino acid residue which is covalently linked to another amino acid residue of the sequence
  MISC_FEATURE (2)..(2): Xaa is phenylalanine, tyrosine, valine, leucine, isoleucine, methionine, or an amino acid residue which is covalently linked to another amino acid residue of the sequence
  MISC_FEATURE (6)..(6): Xaa is valine, leucine, isoleucine, alanine, methionine, or an amino acid residue which is covalently linked to another amino acid residue of the sequence
  MISC_FEATURE (7)..(7): Xaa is glycine, alanine, serine, or an amino acid residue which is covalently linked to another amino acid residue of the sequence
  MISC_FEATURE (8)..(8): Xaa is serine, glycine, alanine, threonine, or an amino acid residue which is covalently linked to another amino acid residue of the sequence
  MISC_FEATURE (9)..(9): Xaa is asparagine, glutamine, methionine, or an amino acid residue which is covalently linked to another amino acid residue of the sequence
  MISC_FEATURE (10)..(10): Xaa is lysine, arginine, or an amino acid residue which is covalently linked to another amino acid residue of the sequence
  MISC_FEATURE (11)..(11): Xaa is glycine, alanine, serine, or an amino acid residue which is covalently linked to another amino acid residue of the sequence
  MISC_FEATURE (12)..(12): Xaa is alanine, valine, glycine, serine, or an amino acid residue which is covalently linked to another amino acid residue of the sequence
  MISC_FEATURE (13)..(13): Xaa is isoleucine, leucine, valine, phenylalanine, methionine, or an amino acid residue which is covalently linked to another amino acid residue of the sequence
  MISC_FEATURE (14)..(14): Xaa is isoleucine, leucine, valine, phenylalanine, methionine, or an amino acid residue which is covalently linked to another amino acid residue of the sequence
XXAEDXXXXXXXXXGL

SEQ ID NO: 900 - protein, 15 aa, Artificial Sequence
  synthetic
  MISC_FEATURE (1)..(1): Xaa is phenylalanine, tyrosine, valine, leucine, isoleucine, methionine, or an amino acid residue which is covalently linked to another amino acid residue of the sequence
  MISC_FEATURE (5)..(5): Xaa is valine, leucine, isoleucine, alanine, methionine, or an amino acid residue which is covalently linked to another amino acid residue of the sequence
  MISC_FEATURE (6)..(6): Xaa is glycine, alanine, serine, or an amino acid residue which is covalently linked to another amino acid residue of the sequence
  MISC_FEATURE (7)..(7): Xaa is serine, glycine, alanine, threonine, or an amino acid residue which is covalently linked to another amino acid residue of the sequence
  MISC_FEATURE (8)..(8): Xaa is asparagine, glutamine, methionine, or an amino acid residue which is covalently linked to another amino acid residue of the sequence
  MISC_FEATURE (9)..(9): Xaa is lysine, arginine, or an amino acid residue which is covalently linked to another amino acid residue of the sequence
  MISC_FEATURE (10)..(10): Xaa is glycine, alanine, serine, or an amino acid residue which is covalently linked to another amino acid residue of the sequence
  MISC_FEATURE (11)..(11): Xaa is alanine, valine, glycine, serine, or an amino acid residue which is covalently linked to another amino acid residue of the sequence
  MISC_FEATURE (12)..(12): Xaa is isoleucine, leucine, valine, phenylalanine, methionine, or an amino acid residue which is covalently linked to another amino acid residue of the sequence
XAEDXXXXXXXXIGL

SEQ ID NO: 901 - protein, 33 aa, Artificial Sequence
  synthetic
  MISC_FEATURE (18)..(18): Xaa is valine, leucine, isoleucine, alanine, methionine, or an amino acid residue which is covalently linked to another amino acid residue of the sequence
  MISC_FEATURE (19)..(19): Xaa is phenylalanine, tyrosine, valine, leucine, isoleucine, methionine, or an amino acid residue which is covalently linked to another amino acid residue of the sequence
  MISC_FEATURE (20)..(20): Xaa is phenylalanine, tyrosine, valine, leucine, isoleucine, methionine, or an amino acid residue which is covalently linked to another amino acid residue of the sequence
  MISC_FEATURE (24)..(24): Xaa is valine, leucine, isoleucine, alanine, methionine, or an amino acid residue which is covalently linked to another amino acid residue of the sequence
  MISC_FEATURE (25)..(25): Xaa is glycine, alanine, serine, or an amino acid residue which is covalently linked to another amino acid residue of the sequence
  MISC_FEATURE (26)..(26): Xaa is serine, glycine, alanine, threonine, or an amino acid residue which is covalently linked to another amino acid residue of the sequence
  MISC_FEATURE (27)..(27): Xaa is asparagine, glutamine, methionine, or an amino acid residue which is covalently linked to another amino acid residue of the sequence
  MISC_FEATURE (28)..(28): Xaa is lysine, arginine, or an amino acid residue which is covalently linked to another amino acid residue of the sequence
  MISC_FEATURE (29)..(29): Xaa is glycine, alanine, serine, or an amino acid residue which is covalently linked to another amino acid residue of the sequence
  MISC_FEATURE (30)..(30): Xaa is alanine, valine, glycine, serine, or an amino acid residue which is covalently linked to another amino acid residue of the sequence
  MISC_FEATURE (31)..(31): Xaa is isoleucine, leucine, valine, phenylalanine, methionine, or an amino acid residue which is covalently linked to another amino acid residue of the sequence
  MISC_FEATURE (32)..(32): Xaa is isoleucine, leucine, valine, phenylalanine, methionine, or an amino acid residue which is covalently linked to another amino acid residue of the sequence
  MISC_FEATURE (33)..(33): Xaa is glycine, alanine, serine, or an amino acid residue which is covalently linked to another amino acid residue of the sequence
DAEFRHDSGYEVHHQKLXXXAEDXXXXXXXXXX

SEQ ID NO: 902 - protein, 32 aa, Artificial Sequence
  synthetic
  MISC_FEATURE (17)..(17): Xaa is valine, leucine, isoleucine, alanine, methionine, or an amino acid residue which is covalently linked to another amino acid residue of the sequence
  MISC_FEATURE (18)..(18): Xaa is phenylalanine, tyrosine, valine, leucine, isoleucine, methionine, or an amino acid residue which is covalently linked to another amino acid residue of the sequence
  MISC_FEATURE (19)..(19): Xaa is phenylalanine, tyrosine, valine, leucine, isoleucine, methionine, or an amino acid residue which is covalently linked to another amino acid residue of the sequence
  MISC_FEATURE (23)..(23): Xaa is valine, leucine, isoleucine, alanine, methionine, or an amino acid residue which is covalently linked to another amino acid residue of the sequence
  MISC_FEATURE (24)..(24): Xaa is glycine, alanine, serine, or an amino acid residue which is covalently linked to another amino acid residue of the sequence
  MISC_FEATURE (25)..(25): Xaa is serine, glycine, alanine, threonine, or an amino acid residue which is covalently linked to another amino acid residue of the sequence
  MISC_FEATURE (26)..(26): Xaa is asparagine, glutamine, methionine, or an amino acid residue which is covalently linked to another amino acid residue of the sequence
  MISC_FEATURE (27)..(27): Xaa is lysine, arginine, or an amino acid residue which is covalently linked to another amino acid residue of the sequence
  MISC_FEATURE (28)..(28): Xaa is glycine, alanine, serine, or an amino acid residue which is covalently linked to another amino acid residue of the sequence
  MISC_FEATURE (29)..(29): Xaa is alanine, valine, glycine, serine, or an amino acid residue which is covalently linked to another amino acid residue of the sequence
  MISC_FEATURE (30)..(30): Xaa is isoleucine, leucine, valine, phenylalanine, methionine, or an amino acid residue which is covalently linked to another amino acid residue of the sequence
  MISC_FEATURE (31)..(31): Xaa is isoleucine, leucine, valine, phenylalanine, methionine, or an amino acid residue which is covalently linked to another amino acid residue of the sequence
  MISC_FEATURE (32)..(32): Xaa is glycine, alanine, serine, or an amino acid residue which is covalently linked to another amino acid residue of the sequence
AEFRHDSGYEVHHQKLXXXAEDXXXXXXXXXX

SEQ ID NO: 903 - protein, 31 aa, Artificial Sequence
  synthetic
  MISC_FEATURE (16)..(16): Xaa is valine, leucine, isoleucine, alanine, methionine, or an amino acid residue which is covalently linked to another amino acid residue of the sequence
  MISC_FEATURE (17)..(17): Xaa is phenylalanine, tyrosine, valine, leucine, isoleucine, methionine, or an amino acid residue which is covalently linked to another amino acid residue of the sequence
  MISC_FEATURE (18)..(18): Xaa is phenylalanine, tyrosine, valine, leucine, isoleucine, methionine, or an amino acid residue which is covalently linked to another amino acid residue of the sequence
  MISC_FEATURE (22)..(22): Xaa is valine, leucine, isoleucine, alanine, methionine, or an amino acid residue which is covalently linked to another amino acid residue of the sequence
  MISC_FEATURE (23)..(23): Xaa is glycine, alanine, serine, or an amino acid residue which is covalently linked to another amino acid residue of the sequence
  MISC_FEATURE (24)..(24): Xaa is serine, glycine, alanine, threonine, or an amino acid residue which is covalently linked to another amino acid residue of the sequence
  MISC_FEATURE (25)..(25): Xaa is asparagine, glutamine, methionine, or an amino acid residue which is covalently linked to another amino acid residue of the sequence
  MISC_FEATURE (26)..(26): Xaa is lysine, arginine, or an amino acid residue which is covalently linked to another amino acid residue of the sequence
  MISC_FEATURE (27)..(27): Xaa is glycine, alanine, serine, or an amino acid residue which is covalently linked to another amino acid residue of the sequence
  MISC_FEATURE (28)..(28): Xaa is alanine, valine, glycine, serine, or an amino acid residue which is covalently linked to another amino acid residue of the sequence
  MISC_FEATURE (29)..(29): Xaa is isoleucine, leucine, valine, phenylalanine, methionine, or an amino acid residue which is covalently linked to another amino acid residue of the sequence
  MISC_FEATURE (30)..(30): Xaa is isoleucine, leucine, valine, phenylalanine, methionine, or an amino acid residue which is covalently linked to another amino acid residue of the sequence
  MISC_FEATURE (31)..(31): Xaa is glycine, alanine, serine, or an amino acid residue which is covalently linked to another amino acid residue of the sequence
EFRHDSGYEVHHQKLXXXAEDXXXXXXXXXX

SEQ ID NO: 904 - protein, 30 aa, Artificial Sequence
  synthetic
  MISC_FEATURE (15)..(15): Xaa is valine, leucine, isoleucine, alanine, methionine, or an amino acid residue which is covalently linked to another amino acid residue of the sequence
  MISC_FEATURE (16)..(16): Xaa is phenylalanine, tyrosine, valine, leucine, isoleucine, methionine, or an amino acid residue which is covalently linked to another amino acid residue of the sequence
  MISC_FEATURE (17)..(17): Xaa is phenylalanine, tyrosine, valine, leucine, isoleucine, methionine, or an amino acid residue which is covalently linked to another amino acid residue of the sequence
  MISC_FEATURE (21)..(21): Xaa is valine, leucine, isoleucine, alanine, methionine, or an amino acid residue which is covalently linked to another amino acid residue of the sequence
  MISC_FEATURE (22)..(22): Xaa is glycine, alanine, serine, or an amino acid residue which is covalently linked to another amino acid residue of the sequence
  MISC_FEATURE (23)..(23): Xaa is serine, glycine, alanine, threonine, or an amino acid residue which is covalently linked to another amino acid residue of the sequence
  MISC_FEATURE (24)..(24): Xaa is asparagine, glutamine, methionine, or an amino acid residue which is covalently linked to another amino acid residue of the sequence
  MISC_FEATURE (25)..(25): Xaa is lysine, arginine, or an amino acid residue which is covalently linked to another amino acid residue of the sequence
  MISC_FEATURE (26)..(26): Xaa is glycine, alanine, serine, or an amino acid residue which is covalently linked to another amino acid residue of the sequence
  MISC_FEATURE (27)..(27): Xaa is alanine, valine, glycine, serine, or an amino acid residue which is covalently linked to another amino acid residue of the sequence
  MISC_FEATURE (28)..(28): Xaa is isoleucine, leucine, valine, phenylalanine, methionine, or an amino acid residue which is covalently linked to another amino acid residue of the sequence
  MISC_FEATURE (29)..(29): Xaa is isoleucine, leucine, valine, phenylalanine, methionine, or an amino acid residue which is covalently linked to another amino acid residue of the sequence
  MISC_FEATURE (30)..(30): Xaa is glycine, alanine, serine, or an amino acid residue which is covalently linked to another amino acid residue of the sequence
FRHDSGYEVHHQKLXXXAEDXXXXXXXXXX

SEQ ID NO: 905 - protein, 29 aa, Artificial Sequence
  synthetic
  MISC_FEATURE (14)..(14): Xaa is valine, leucine, isoleucine, alanine, methionine, or an amino acid residue which is covalently linked to another amino acid residue of the sequence
  MISC_FEATURE (15)..(15): Xaa is phenylalanine, tyrosine, valine, leucine, isoleucine, methionine, or an amino acid residue which is covalently linked to another amino acid residue of the sequence
  MISC_FEATURE (16)..(16): Xaa is phenylalanine, tyrosine, valine, leucine, isoleucine, methionine, or an amino acid residue which is covalently linked to another amino acid residue of the sequence
  MISC_FEATURE (20)..(20): Xaa is valine, leucine, isoleucine, alanine, methionine, or an amino acid residue which is covalently linked to another amino acid residue of the sequence
  MISC_FEATURE (21)..(21): Xaa is glycine, alanine, serine, or an amino acid residue which is covalently linked to another amino acid residue of the sequence
  MISC_FEATURE (22)..(22): Xaa is serine, glycine, alanine, threonine, or an amino acid residue which is covalently linked to another amino acid residue of the sequence
  MISC_FEATURE (23)..(23): Xaa is asparagine, glutamine, methionine, or an amino acid residue which is covalently linked to another amino acid residue of the sequence
  MISC_FEATURE (24)..(24): Xaa is lysine, arginine, or an amino acid residue which is covalently linked to another amino acid residue of the sequence
  MISC_FEATURE (25)..(25): Xaa is glycine, alanine, serine, or an amino acid residue which is covalently linked to another amino acid residue of the sequence
  MISC_FEATURE (26)..(26): Xaa is alanine, valine, glycine, serine, or an amino acid residue which is covalently linked to another amino acid residue of the sequence
  MISC_FEATURE (27)..(27): Xaa is isoleucine, leucine, valine, phenylalanine, methionine, or an amino acid residue which is covalently linked to another amino acid residue of the sequence
  MISC_FEATURE (28)..(28): Xaa is isoleucine, leucine, valine, phenylalanine, methionine, or an amino acid residue which is covalently linked to another amino acid residue of the sequence
  MISC_FEATURE (29)..(29): Xaa is glycine, alanine, serine, or an amino acid residue which is covalently linked to another amino acid residue of the sequence
RHDSGYEVHHQKLXXXAEDXXXXXXXXXX

SEQ ID NO: 906 - protein, 28 aa, Artificial Sequence
  synthetic
  MISC_FEATURE (13)..(13): Xaa is valine, leucine, isoleucine, alanine, methionine, or an amino acid residue which is covalently linked to another amino acid residue of the sequence
  MISC_FEATURE (14)..(14): Xaa is phenylalanine, tyrosine, valine, leucine, isoleucine, methionine, or an amino acid residue which is covalently linked to another amino acid residue of the sequence
  MISC_FEATURE (15)..(15): Xaa is phenylalanine, tyrosine, valine, leucine, isoleucine, methionine, or an amino acid residue which is covalently linked to another amino acid residue of the sequence
  MISC_FEATURE (19)..(19): Xaa is valine, leucine, isoleucine, alanine, methionine, or an amino acid residue which is covalently linked to another amino acid residue of the sequence
  MISC_FEATURE (20)..(20): Xaa is glycine, alanine, serine, or an amino acid residue which is covalently linked to another amino acid residue of the sequence
  MISC_FEATURE (21)..(21): Xaa is serine, glycine, alanine, threonine, or an amino acid residue which is covalently linked to another amino acid residue of the sequence
  MISC_FEATURE (22)..(22): Xaa is asparagine, glutamine, methionine, or an amino acid residue which is covalently linked to another amino acid residue of the sequence
  MISC_FEATURE (23)..(23): Xaa is lysine, arginine, or an amino acid residue which is covalently linked to another amino acid residue of the sequence
  MISC_FEATURE (24)..(24): Xaa is glycine, alanine, serine, or an amino acid residue which is covalently linked to another amino acid residue of the sequence
  MISC_FEATURE (25)..(25): Xaa is alanine, valine, glycine, serine, or an amino acid residue which is covalently linked to another amino acid residue of the sequence
  MISC_FEATURE (26)..(26): Xaa is isoleucine, leucine, valine, phenylalanine, methionine, or an amino acid residue which is covalently linked to another amino acid residue of the sequence
  MISC_FEATURE (27)..(27): Xaa is isoleucine, leucine, valine, phenylalanine, methionine, or an amino acid residue which is covalently linked to another amino acid residue of the sequence
  MISC_FEATURE (28)..(28): Xaa is glycine, alanine, serine, or an amino acid residue which is covalently linked to another amino acid residue of the sequence
HDSGYEVHHQKLXXXAEDXXXXXXXXXX

SEQ ID NO: 907 - protein, 27 aa, Artificial Sequence
  synthetic
  MISC_FEATURE (12)..(12): Xaa is valine, leucine, isoleucine, alanine, methionine, or an amino acid residue which is covalently linked to another amino acid residue of the sequence
  MISC_FEATURE (13)..(13): Xaa is phenylalanine, tyrosine, valine, leucine, isoleucine, methionine, or an amino acid residue which is covalently linked to another amino acid residue of the sequence
  MISC_FEATURE (14)..(14): Xaa is phenylalanine, tyrosine, valine, leucine, isoleucine, methionine, or an amino acid residue which is covalently linked to another amino acid residue of the sequence
  MISC_FEATURE (18)..(18): Xaa is valine, leucine, isoleucine, alanine, methionine, or an amino acid residue which is covalently linked to another amino acid residue of the sequence
  MISC_FEATURE (19)..(19): Xaa is glycine, alanine, serine, or an amino acid residue which is covalently linked to another amino acid residue of the sequence
  MISC_FEATURE (20)..(20): Xaa is serine, glycine, alanine, threonine, or an amino acid residue which is covalently linked to another amino acid residue of the sequence
  MISC_FEATURE (21)..(21): Xaa is asparagine, glutamine, methionine, or an amino acid residue which is covalently linked to another amino acid residue of the sequence
  MISC_FEATURE (22)..(22): Xaa is lysine, arginine, or an amino acid residue which is covalently linked to another amino acid residue of the sequence
  MISC_FEATURE (23)..(23): Xaa is glycine, alanine, serine, or an amino acid residue which is covalently linked to another amino acid residue of the sequence
  MISC_FEATURE (24)..(24): Xaa is alanine, valine, glycine, serine, or an amino acid residue which is covalently linked to another amino acid residue of the sequence
  MISC_FEATURE (25)..(25): Xaa is isoleucine, leucine, valine, phenylalanine, methionine, or an amino acid residue which is covalently linked to another amino acid residue of the sequence
  MISC_FEATURE (26)..(26): Xaa is isoleucine, leucine, valine, phenylalanine, methionine, or an amino acid residue which is covalently linked to another amino acid residue of the sequence
  MISC_FEATURE (27)..(27): Xaa is glycine, alanine, serine, or an amino acid residue which is covalently linked to another amino acid residue of the sequence
DSGYEVHHQKLXXXAEDXXXXXXXXXX

SEQ ID NO: 908 - protein, 26 aa, Artificial Sequence
  synthetic
  MISC_FEATURE (11)..(11): Xaa is valine, leucine, isoleucine, alanine, methionine, or an amino acid residue which is covalently linked to another amino acid residue of the sequence
  MISC_FEATURE (12)..(12): Xaa is phenylalanine, tyrosine, valine, leucine, isoleucine, methionine, or an amino acid residue which is covalently linked to another amino acid residue of the sequence
  MISC_FEATURE (13)..(13): Xaa is phenylalanine, tyrosine, valine, leucine, isoleucine, methionine, or an amino acid residue which is covalently linked to another amino acid residue of the sequence
  MISC_FEATURE (17)..(17): Xaa is valine, leucine, isoleucine, alanine, methionine, or an amino acid residue which is covalently linked to another amino acid residue of the sequence
  MISC_FEATURE (18)..(18): Xaa is glycine, alanine, serine, or an amino acid residue which is covalently linked to another amino acid residue of the sequence
  MISC_FEATURE (19)..(19): Xaa is serine, glycine, alanine, threonine, or an amino acid residue which is covalently linked to another amino acid residue of the sequence
  MISC_FEATURE (20)..(20): Xaa is asparagine, glutamine, methionine, or an amino acid residue which is covalently linked to another amino acid residue of the sequence
  MISC_FEATURE (21)..(21): Xaa is lysine, arginine, or an amino acid residue which is covalently linked to another amino acid residue of the sequence
  MISC_FEATURE (22)..(22): Xaa is glycine, alanine, serine, or an amino acid residue which is covalently linked to another amino acid residue of the sequence
  MISC_FEATURE (23)..(23): Xaa is alanine, valine, glycine, serine, or an amino acid residue which is covalently linked to another amino acid residue of the sequence
  MISC_FEATURE (24)..(24): Xaa is isoleucine, leucine, valine, phenylalanine, methionine, or an amino acid residue which is covalently linked to another amino acid residue of the sequence
  MISC_FEATURE (25)..(25): Xaa is isoleucine, leucine, valine, phenylalanine, methionine, or an amino acid residue which is covalently linked to another amino acid residue of the sequence
  MISC_FEATURE (26)..(26): Xaa is glycine, alanine, serine, or an amino acid residue which is covalently linked to another amino acid residue of the sequence
SGYEVHHQKLXXXAEDXXXXXXXXXX

SEQ ID NO: 909 - protein, 25 aa, Artificial Sequence
  synthetic
  MISC_FEATURE (10)..(10): Xaa is valine, leucine, isoleucine, alanine, methionine, or an amino acid residue which is covalently linked to another amino acid residue of the sequence
  MISC_FEATURE (11)..(11): Xaa is phenylalanine, tyrosine, valine, leucine, isoleucine, methionine, or an amino acid residue which is covalently linked to another amino acid residue of the sequence
  MISC_FEATURE (12)..(12): Xaa is phenylalanine, tyrosine, valine, leucine, isoleucine, methionine, or an amino acid residue which is covalently linked to another amino acid residue of the sequence
  MISC_FEATURE (16)..(16): Xaa is valine, leucine, isoleucine, alanine, methionine, or an amino acid residue which is covalently linked to another amino acid residue of the sequence
  MISC_FEATURE (17)..(17): Xaa is glycine, alanine, serine, or an amino acid residue which is covalently linked to another amino acid residue of the sequence
  MISC_FEATURE (18)..(18): Xaa is serine, glycine, alanine, threonine, or an amino acid residue which is covalently linked to another amino acid residue of the sequence
  MISC_FEATURE (19)..(19): Xaa is asparagine, glutamine, methionine, or an amino acid residue which is covalently linked to another amino acid residue of the sequence
  MISC_FEATURE (20)..(20): Xaa is lysine, arginine, or an amino acid residue which is covalently linked to another amino acid residue of the sequence
  MISC_FEATURE (21)..(21): Xaa is glycine, alanine, serine, or an amino acid residue which is covalently linked to another amino acid residue of the sequence
  MISC_FEATURE (22)..(22): Xaa is alanine, valine, glycine, serine, or an amino acid residue which is covalently linked to another amino acid residue of the sequence
  MISC_FEATURE (23)..(23): Xaa is isoleucine, leucine, valine, phenylalanine, methionine, or an amino acid residue which is covalently linked to another amino acid residue of the sequence
  MISC_FEATURE (24)..(24): Xaa is isoleucine, leucine, valine, phenylalanine, methionine, or an amino acid residue which is covalently linked to another amino acid residue of the sequence
  MISC_FEATURE (25)..(25): Xaa is glycine, alanine, serine, or an amino acid residue which is covalently linked to another amino acid residue of the sequence
GYEVHHQKLXXXAEDXXXXXXXXXX

SEQ ID NO: 910 - protein, 24 aa, Artificial Sequence
  synthetic
  MISC_FEATURE (9)..(9): Xaa is valine, leucine, isoleucine, alanine, methionine, or an amino acid residue which is covalently linked to another amino acid residue of the sequence
  MISC_FEATURE (10)..(10): Xaa is phenylalanine, tyrosine, valine, leucine, isoleucine, methionine, or an amino acid residue which is covalently linked to another amino acid residue of the sequence
  MISC_FEATURE (11)..(11): Xaa is phenylalanine, tyrosine, valine, leucine, isoleucine, methionine, or an amino acid residue which is covalently linked to another amino acid residue of the sequence
  MISC_FEATURE (15)..(15): Xaa is valine, leucine, isoleucine, alanine, methionine, or an amino acid residue which is covalently linked to another amino acid residue of the sequence
  MISC_FEATURE (16)..(16): Xaa is glycine, alanine, serine, or an amino acid residue which is covalently linked to another amino acid residue of the sequence
  MISC_FEATURE (17)..(17): Xaa is serine, glycine, alanine, threonine, or an amino acid residue which is covalently linked to another amino acid residue of the sequence
  MISC_FEATURE (18)..(18): Xaa is asparagine, glutamine, methionine, or an amino acid residue which is covalently linked to another amino acid residue of the sequence
  MISC_FEATURE (19)..(19): Xaa is lysine, arginine, or an amino acid residue which is covalently linked to another amino acid residue of the sequence
  MISC_FEATURE (20)..(20): Xaa is glycine, alanine, serine, or an amino acid residue which is covalently linked to another amino acid residue of the sequence
  MISC_FEATURE (21)..(21): Xaa is alanine, valine, glycine, serine, or an amino acid residue which is covalently linked to another amino acid residue of the sequence
  MISC_FEATURE (22)..(22): Xaa is isoleucine, leucine, valine, phenylalanine, methionine, or an amino acid residue which is covalently linked to another amino acid residue of the sequence
  MISC_FEATURE (23)..(23): Xaa is isoleucine, leucine, valine, phenylalanine, methionine, or an amino acid residue which is covalently linked to another amino acid residue of the sequence
  MISC_FEATURE (24)..(24): Xaa is glycine, alanine, serine, or an amino acid residue which is covalently linked to another amino acid residue of the sequence
YEVHHQKLXXXAEDXXXXXXXXXX

SEQ ID NO: 911 - protein, 23 aa, Artificial Sequence
  synthetic
  MISC_FEATURE (8)..(8): Xaa is valine, leucine, isoleucine, alanine, methionine, or an amino acid residue which is covalently linked to another amino acid residue of the sequence
  MISC_FEATURE (9)..(9): Xaa is phenylalanine, tyrosine, valine, leucine, isoleucine, methionine, or an amino acid residue which is covalently linked to another amino acid residue of the sequence
  MISC_FEATURE (10)..(10): Xaa is phenylalanine, tyrosine, valine, leucine, isoleucine, methionine, or an amino acid residue which is covalently linked to another amino acid residue of the sequence
  MISC_FEATURE (14)..(14): Xaa is valine, leucine, isoleucine, alanine, methionine, or an amino acid residue which is covalently linked to another amino acid residue of the sequence
  MISC_FEATURE (15)..(15): Xaa is glycine, alanine, serine, or an amino acid residue which is covalently linked to another amino acid residue of the sequence
  MISC_FEATURE (16)..(16): Xaa is serine, glycine, alanine, threonine, or an amino acid residue which is covalently linked to another amino acid residue of the sequence
  MISC_FEATURE (17)..(17): Xaa is asparagine, glutamine, methionine, or an amino acid residue which is covalently linked to another amino acid residue of the sequence
  MISC_FEATURE (18)..(18): Xaa is lysine, arginine, or an amino acid residue which is covalently linked to another amino acid residue of the sequence
  MISC_FEATURE (19)..(19): Xaa is glycine, alanine, serine, or an amino acid residue which is covalently linked to another amino acid residue of the sequence
  MISC_FEATURE (20)..(20): Xaa is alanine, valine, glycine, serine, or an amino acid residue which is covalently linked to another amino acid residue of the sequence
  MISC_FEATURE (21)..(21): Xaa is isoleucine, leucine, valine, phenylalanine, methionine, or an amino acid residue which is covalently linked to another amino acid residue of the sequence
  MISC_FEATURE (22)..(22): Xaa is isoleucine, leucine, valine, phenylalanine, methionine, or an amino acid residue which is covalently linked to another amino acid residue of the sequence
  MISC_FEATURE (23)..(23): Xaa is glycine, alanine, serine, or an amino acid residue which is covalently linked to another amino acid residue of the sequence
EVHHQKLXXXAEDXXXXXXXXXX

SEQ ID NO: 912 - protein, 22 aa, Artificial Sequence
  synthetic
  MISC_FEATURE (7)..(7): Xaa is valine, leucine, isoleucine, alanine, methionine, or an amino acid residue which is covalently linked to another amino acid residue of the sequence
  MISC_FEATURE (8)..(8): Xaa is phenylalanine, tyrosine, valine, leucine, isoleucine, methionine, or an amino acid residue which is covalently linked to another amino acid residue of the sequence
  MISC_FEATURE (9)..(9): Xaa is phenylalanine, tyrosine, valine, leucine, isoleucine, methionine, or an amino acid residue which is covalently linked to another amino acid residue of the sequence
  MISC_FEATURE (13)..(13): Xaa is valine, leucine, isoleucine, alanine, methionine, or an amino acid residue which is covalently linked to another amino acid residue of the sequence
  MISC_FEATURE (14)..(14): Xaa is glycine, alanine, serine, or an amino acid residue which is covalently linked to another amino acid residue of the sequence
  MISC_FEATURE (15)..(15): Xaa is serine, glycine, alanine, threonine, or an amino acid residue which is covalently linked to another amino acid residue of the sequence
  MISC_FEATURE (16)..(16): Xaa is asparagine, glutamine, methionine, or an amino acid residue which is covalently linked to another amino acid residue of the sequence
  MISC_FEATURE (17)..(17): Xaa is lysine, arginine, or an amino acid residue which is covalently linked to another amino acid residue of the sequence
  MISC_FEATURE (18)..(18): Xaa is glycine, alanine, serine, or an amino acid residue which is covalently linked to another amino acid residue of the sequence
  MISC_FEATURE (19)..(19): Xaa is alanine, valine, glycine, serine, or an amino acid residue which is covalently linked to another amino acid residue of the sequence
  MISC_FEATURE (20)..(20): Xaa is isoleucine, leucine, valine, phenylalanine, methionine, or an amino acid residue which is covalently linked to another amino acid residue of the sequence
  MISC_FEATURE (21)..(21): Xaa is isoleucine, leucine, valine, phenylalanine, methionine, or an amino acid residue which is covalently linked to another amino acid residue of the sequence
  MISC_FEATURE (22)..(22): Xaa is glycine, alanine, serine, or an amino acid residue which is covalently linked to another amino acid residue of the sequence
VHHQKLXXXAEDXXXXXXXXXX

SEQ ID NO: 913 - protein, 21 aa, Artificial Sequence
  synthetic
  MISC_FEATURE (6)..(6): Xaa is valine, leucine, isoleucine, alanine, methionine, or an amino acid residue which is covalently linked to another amino acid residue of the sequence
  MISC_FEATURE (7)..(7): Xaa is phenylalanine, tyrosine, valine, leucine, isoleucine, methionine, or an amino acid residue which is covalently linked to another amino acid residue of the sequence
  MISC_FEATURE (8)..(8): Xaa is phenylalanine, tyrosine, valine, leucine, isoleucine, methionine, or an amino acid residue which is covalently linked to another amino acid residue of the sequence
  MISC_FEATURE (12)..(12): Xaa is valine, leucine, isoleucine, alanine, methionine, or an amino acid residue which is covalently linked to another amino acid residue of the sequence
  MISC_FEATURE (13)..(13): Xaa is glycine, alanine, serine, or an amino acid residue which is covalently linked to another amino acid residue of the sequence
  MISC_FEATURE (14)..(14): Xaa is serine, glycine, alanine, threonine, or an amino acid residue which is covalently linked to another amino acid residue of the sequence
  MISC_FEATURE (15)..(15): Xaa is asparagine, glutamine, methionine, or an amino acid residue which is covalently linked to another amino acid residue of the sequence
  MISC_FEATURE (16)..(16): Xaa is lysine, arginine, or an amino acid residue which is covalently linked to another amino acid residue of the sequence
  MISC_FEATURE (17)..(17): Xaa is glycine, alanine, serine, or an amino acid residue which is covalently linked to another amino acid residue of the sequence
  MISC_FEATURE (18)..(18): Xaa is alanine, valine, glycine, serine, or an amino acid residue which is covalently linked to another amino acid residue of the sequence
  MISC_FEATURE (19)..(19): Xaa is isoleucine, leucine, valine, phenylalanine, methionine, or an amino acid residue which is covalently linked to another amino acid residue of the sequence
  MISC_FEATURE (20)..(20): Xaa is isoleucine, leucine, valine, phenylalanine, methionine, or an amino acid residue which is covalently linked to another amino acid residue of the sequence
  MISC_FEATURE (21)..(21): Xaa is glycine, alanine, serine, or an amino acid residue which is covalently linked to another amino acid residue of the sequence
HHQKLXXXAEDXXXXXXXXXX

SEQ ID NO: 914 - protein, 20 aa, Artificial Sequence
  synthetic
  MISC_FEATURE (5)..(5): Xaa is valine, leucine, isoleucine, alanine, methionine, or an amino acid residue which is covalently linked to another amino acid residue of the sequence
  MISC_FEATURE (6)..(6): Xaa is phenylalanine, tyrosine, valine, leucine, isoleucine, methionine, or an amino acid residue which is covalently linked to another amino acid residue of the sequence
  MISC_FEATURE (7)..(7): Xaa is phenylalanine, tyrosine, valine, leucine, isoleucine, methionine, or an amino acid residue which is covalently linked to another amino acid residue of the sequence
  MISC_FEATURE (11)..(11): Xaa is valine, leucine, isoleucine, alanine, methionine, or an amino acid residue which is covalently linked to another amino acid residue of the sequence
  MISC_FEATURE (12)..(12): Xaa is glycine, alanine, serine, or an amino acid residue which is covalently linked to another amino acid residue of the sequence
  MISC_FEATURE (13)..(13): Xaa is serine, glycine, alanine, threonine, or an amino acid residue which is covalently linked to another amino acid residue of the sequence
  MISC_FEATURE (14)..(14): Xaa is asparagine, glutamine, methionine, or an amino acid residue which is covalently linked to another amino acid residue of the sequence
  MISC_FEATURE (15)..(15): Xaa is lysine, arginine, or an amino acid residue which is covalently linked to another amino acid residue of the sequence
  MISC_FEATURE (16)..(16): Xaa is glycine, alanine, serine, or an amino acid residue which is covalently linked to another amino acid residue of the sequence
  MISC_FEATURE (17)..(17): Xaa is alanine, valine, glycine, serine, or an amino acid residue which is covalently linked to another amino acid residue of the sequence
  MISC_FEATURE (18)..(18): Xaa is isoleucine, leucine, valine, phenylalanine, methionine, or an amino acid residue which is covalently linked to another amino acid residue of the sequence
  MISC_FEATURE (19)..(19): Xaa is isoleucine, leucine, valine, phenylalanine, methionine, or an amino acid residue which is covalently linked to another amino acid residue of the sequence
  MISC_FEATURE (20)..(20): Xaa is glycine, alanine, serine, or an amino acid residue which is covalently linked to another amino acid residue of the sequence
HQKLXXXAEDXXXXXXXXXX

SEQ ID NO: 915 - protein, 19 aa, Artificial Sequence
  synthetic
  MISC_FEATURE (4)..(4): Xaa is valine, leucine, isoleucine, alanine, methionine, or an amino acid residue which is covalently linked to another amino acid residue of the sequence
  MISC_FEATURE (5)..(5): Xaa is phenylalanine, tyrosine, valine, leucine, isoleucine, methionine, or an amino acid residue which is covalently linked to another amino acid residue of the sequence
  MISC_FEATURE (6)..(6): Xaa is phenylalanine, tyrosine, valine, leucine, isoleucine, methionine, or an amino acid residue which is covalently linked to another amino acid residue of the sequence
  MISC_FEATURE (10)..(10): Xaa is valine, leucine, isoleucine, alanine, methionine, or an amino acid residue which is covalently linked to another amino acid residue of the sequence
  MISC_FEATURE (11)..(11): Xaa is glycine, alanine, serine, or an amino acid residue which is covalently linked to another amino acid residue of the sequence
  MISC_FEATURE (12)..(12): Xaa is serine, glycine, alanine, threonine, or an amino acid residue which is covalently linked to another amino acid residue of the sequence
  MISC_FEATURE (13)..(13): Xaa is asparagine, glutamine, methionine, or an amino acid residue which is covalently linked to another amino acid residue of the sequence
  MISC_FEATURE (14)..(14): Xaa is lysine, arginine, or an amino acid residue which is covalently linked to another amino acid residue of the sequence
  MISC_FEATURE (15)..(15): Xaa is glycine, alanine, serine, or an amino acid residue which is covalently linked to another amino acid residue of the sequence
  MISC_FEATURE (16)..(16): Xaa is alanine, valine, glycine, serine, or an amino acid residue which is covalently linked to another amino acid residue of the sequence
  MISC_FEATURE (17)..(17): Xaa is isoleucine, leucine, valine, phenylalanine, methionine, or an amino acid residue which is covalently linked to another amino acid residue of the sequence
  MISC_FEATURE (18)..(18): Xaa is isoleucine, leucine, valine, phenylalanine, methionine, or an amino acid residue which is covalently linked to another amino acid residue of the sequence
  MISC_FEATURE (19)..(19): Xaa is glycine, alanine, serine, or an amino acid residue which is covalently linked to another amino acid residue of the sequence
QKLXXXAEDXXXXXXXXXX

SEQ ID NO: 916 - protein, 18 aa, Artificial Sequence
  synthetic
  MISC_FEATURE (3)..(3): Xaa is valine, leucine, isoleucine, alanine, methionine, or an amino acid residue which is covalently linked to another amino acid residue of the sequence
  MISC_FEATURE (4)..(4): Xaa is phenylalanine, tyrosine, valine, leucine, isoleucine, methionine, or an amino acid residue which is covalently linked to another amino acid residue of the sequence
  MISC_FEATURE (5)..(5): Xaa is phenylalanine, tyrosine, valine, leucine, isoleucine, methionine, or an amino acid residue which is covalently linked to another amino acid residue of the sequence
  MISC_FEATURE (9)..(9): Xaa is valine, leucine, isoleucine, alanine, methionine, or an amino acid residue which is covalently linked to another amino acid residue of the sequence
  MISC_FEATURE (10)..(10): Xaa is glycine, alanine, serine, or an amino acid residue which is covalently linked to another amino acid residue of the sequence
  MISC_FEATURE (11)..(11): Xaa is serine, glycine, alanine, threonine, or an amino acid residue which is covalently linked to another amino acid residue of the sequence
  MISC_FEATURE (12)..(12): Xaa is asparagine, glutamine, methionine, or an amino acid residue which is covalently linked to another amino acid residue of the sequence
  MISC_FEATURE (13)..(13): Xaa is lysine, arginine, or an amino acid residue which is covalently linked to another amino acid residue of the sequence
  MISC_FEATURE (14)..(14): Xaa is glycine, alanine, serine, or an amino acid residue which is covalently linked to another amino acid residue of the sequence
  MISC_FEATURE (15)..(15): Xaa is alanine, valine, glycine, serine, or an amino acid residue which is covalently linked to another amino acid residue of the sequence
  MISC_FEATURE (16)..(16): Xaa is isoleucine, leucine, valine, phenylalanine, methionine, or an amino acid residue which is covalently linked to another amino acid residue of the sequence
  MISC_FEATURE (17)..(17): Xaa is isoleucine, leucine, valine, phenylalanine, methionine, or an amino acid residue which is covalently linked to another amino acid residue of the sequence
  MISC_FEATURE (18)..(18): Xaa is glycine, alanine, serine, or an amino acid residue which is covalently linked to another amino acid residue of the sequence
KLXXXAEDXXXXXXXXXX

SEQ ID NO: 917 - protein, 17 aa, Artificial Sequence
  synthetic
  MISC_FEATURE (2)..(2): Xaa is valine, leucine, isoleucine, alanine, methionine, or an amino acid residue which is covalently linked to another amino acid residue of the sequence
  MISC_FEATURE (3)..(3): Xaa is phenylalanine, tyrosine, valine, leucine, isoleucine, methionine, or an amino acid residue which is covalently linked to another amino acid residue of the sequence
  MISC_FEATURE (4)..(4): Xaa is phenylalanine, tyrosine, valine, leucine, isoleucine, methionine, or an amino acid residue which is covalently linked to another amino acid residue of the sequence
  MISC_FEATURE (8)..(8): Xaa is valine, leucine, isoleucine, alanine, methionine, or an amino acid residue which is covalently linked to another amino acid residue of the sequence
  MISC_FEATURE (9)..(9): Xaa is glycine, alanine, serine, or an amino acid residue which is covalently linked to another amino acid residue of the sequence
  MISC_FEATURE (10)..(10): Xaa is serine, glycine, alanine, threonine, or an amino acid residue which is covalently linked to another amino acid residue of the sequence
  MISC_FEATURE (11)..(11): Xaa is asparagine, glutamine, methionine, or an amino acid residue which is covalently linked to another amino acid residue of the sequence
  MISC_FEATURE (12)..(12): Xaa is lysine, arginine, or an amino acid residue which is covalently linked to another amino acid residue of the sequence
  MISC_FEATURE (13)..(13): Xaa is glycine, alanine, serine, or an amino acid residue which is covalently linked to another amino acid residue of the sequence
  MISC_FEATURE (14)..(14): Xaa is alanine, valine, glycine, serine, or an amino acid residue which is covalently linked to another amino acid residue of the sequence
  MISC_FEATURE (15)..(15): Xaa is isoleucine, leucine, valine, phenylalanine, methionine, or an amino acid residue which is covalently linked to another amino acid residue of the sequence
  MISC_FEATURE (16)..(16): Xaa is isoleucine, leucine, valine, phenylalanine, methionine, or an amino acid residue which is covalently linked to another amino acid residue of the sequence
  MISC_FEATURE (17)..(17): Xaa is glycine, alanine, serine, or an amino acid residue which is covalently linked to another amino acid residue of the sequence
LXXXAEDXXXXXXXXXX

SEQ ID NO: 918 - protein, 16 aa, Artificial Sequence
  synthetic
  MISC_FEATURE (1)..(1): Xaa is valine, leucine, isoleucine, alanine, methionine, or an amino acid residue which is covalently linked to another amino acid residue of the sequence
  MISC_FEATURE (2)..(2): Xaa is phenylalanine, tyrosine, valine, leucine, isoleucine, methionine, or an amino acid residue which is covalently linked to another amino acid residue of the sequence
  MISC_FEATURE (3)..(3): Xaa is phenylalanine, tyrosine, valine, leucine, isoleucine, methionine, or an amino acid residue which is covalently linked to another amino acid residue of the sequence
  MISC_FEATURE (7)..(7): Xaa is valine, leucine, isoleucine, alanine, methionine, or an amino acid residue which is covalently linked to another amino acid residue of the sequence
  MISC_FEATURE (8)..(8): Xaa is glycine, alanine, serine, or an amino acid residue which is covalently linked to another amino acid residue of the sequence
  MISC_FEATURE (9)..(9): Xaa is serine, glycine, alanine, threonine, or an amino acid residue which is covalently linked to another amino acid residue of the sequence
  MISC_FEATURE (10)..(10): Xaa is asparagine, glutamine, methionine, or an amino acid residue which is covalently linked to another amino acid residue of the sequence
  MISC_FEATURE (11)..(11): Xaa is lysine, arginine, or an amino acid residue which is covalently linked to another amino acid residue of the sequence
  MISC_FEATURE (12)..(12): Xaa is glycine, alanine, serine, or an amino acid residue which is covalently linked to another amino acid residue of the sequence
  MISC_FEATURE (13)..(13): Xaa is alanine, valine, glycine, serine, or an amino acid residue which is covalently linked to another amino acid residue of the sequence
  MISC_FEATURE (14)..(14): Xaa is isoleucine, leucine, valine, phenylalanine, methionine, or an amino acid residue which is covalently linked to another amino acid residue of the sequence
  MISC_FEATURE (15)..(15): Xaa is isoleucine, leucine, valine, phenylalanine, methionine, or an amino acid residue which is covalently linked to another amino acid residue of the sequence
  MISC_FEATURE (16)..(16): Xaa is glycine, alanine, serine, or an amino acid residue which is covalently linked to another amino acid residue of the sequence
XXXAEDXXXXXXXXXX

SEQ ID NO: 919 - protein, 15 aa, Artificial Sequence
  synthetic
  MISC_FEATURE (1)..(1): Xaa is phenylalanine, tyrosine, valine, leucine, isoleucine, methionine, or an amino acid residue which is covalently linked to another amino acid residue of the sequence
  MISC_FEATURE (2)..(2): Xaa is phenylalanine, tyrosine, valine, leucine, isoleucine, methionine, or an amino acid residue which is covalently linked to another amino acid residue of the sequence
  MISC_FEATURE (6)..(6): Xaa is valine, leucine, isoleucine, alanine, methionine, or an amino acid residue which is covalently linked to another amino acid residue of the sequence
  MISC_FEATURE (7)..(7): Xaa is glycine, alanine, serine, or an amino acid residue which is covalently linked to another amino acid residue of the sequence
  MISC_FEATURE (8)..(8): Xaa is serine, glycine, alanine, threonine, or an amino acid residue which is covalently linked to another amino acid residue of the sequence
  MISC_FEATURE (9)..(9): Xaa is asparagine, glutamine, methionine, or an amino acid residue which is covalently linked to another amino acid residue of the sequence
  MISC_FEATURE (10)..(10): Xaa is lysine, arginine, or an amino acid residue which is covalently linked to another amino acid residue of the sequence
  MISC_FEATURE (11)..(11): Xaa is glycine, alanine, serine, or an amino acid residue which is covalently linked to another amino acid residue of the sequence
  MISC_FEATURE (12)..(12): Xaa is alanine, valine, glycine, serine, or an amino acid residue which is covalently linked to another amino acid residue of the sequence
  MISC_FEATURE (13)..(13): Xaa is isoleucine, leucine, valine, phenylalanine, methionine, or an amino acid residue which is covalently linked to another amino acid residue of the sequence
  MISC_FEATURE (14)..(14): Xaa is isoleucine, leucine, valine, phenylalanine, methionine, or an amino acid residue which is covalently linked to another amino acid residue of the sequence
XXAEDXXXXXXXXXG

SEQ ID NO: 920 - protein, 14 aa, Artificial Sequence
  synthetic
  MISC_FEATURE (1)..(1): Xaa is phenylalanine, tyrosine, valine, leucine, isoleucine, methionine, or an amino acid residue which is covalently linked to another amino acid residue of the sequence
  MISC_FEATURE (5)..(5): Xaa is valine, leucine, isoleucine, alanine, methionine, or an amino acid residue which is covalently linked to another amino acid residue of the sequence
  MISC_FEATURE (6)..(6): Xaa is glycine, alanine, serine, or an amino acid residue which is covalently linked to another amino acid residue of the sequence
  MISC_FEATURE (7)..(7): Xaa is serine, glycine, alanine, threonine, or an amino acid residue which is covalently linked to another amino acid residue of the sequence
  MISC_FEATURE (8)..(8): Xaa is asparagine, glutamine, methionine, or an amino acid residue which is covalently linked to another amino acid residue of the sequence
  MISC_FEATURE (9)..(9): Xaa is lysine, arginine, or an amino acid residue which is covalently linked to another amino acid residue of the sequence
  MISC_FEATURE (10)..(10): Xaa is glycine, alanine, serine, or an amino acid residue which is covalently linked to another amino acid residue of the sequence
  MISC_FEATURE (11)..(11): Xaa is alanine, valine, glycine, serine, or an amino acid residue which is covalently linked to another amino acid residue of the sequence
  MISC_FEATURE (12)..(12): Xaa is isoleucine, leucine, valine, phenylalanine, methionine, or an amino acid residue which is covalently linked to another amino acid residue of the sequence
XAEDXXXXXXXXIG

SEQ ID NO: 921 - protein, 32 aa, Artificial Sequence
  synthetic
  MISC_FEATURE (19)..(19): Xaa is phenylalanine, tyrosine, valine, leucine, isoleucine, methionine, or an amino acid residue which is covalently linked to another amino acid residue of the sequence
  MISC_FEATURE (20)..(20): Xaa is phenylalanine, tyrosine, valine, leucine, isoleucine, methionine, or an amino acid residue which is covalently linked to another amino acid residue of the sequence
  MISC_FEATURE (24)..(24): Xaa is valine, leucine, isoleucine, alanine, methionine, or an amino acid residue which is covalently linked to another amino acid residue of the sequence
  MISC_FEATURE (25)..(25): Xaa is glycine, alanine, serine, or an amino acid residue which is covalently linked to another amino acid residue of the sequence
  MISC_FEATURE (26)..(26): Xaa is serine, glycine, alanine, threonine, or an amino acid residue which is covalently linked to another amino acid residue of the sequence
  MISC_FEATURE (27)..(27): Xaa is asparagine, glutamine, methionine, or an amino acid residue which is covalently linked to another amino acid residue of the sequence
  MISC_FEATURE (28)..(28): Xaa is lysine, arginine, or an amino acid residue which is covalently linked to another amino acid residue of the sequence
  MISC_FEATURE (29)..(29): Xaa is glycine, alanine, serine, or an amino acid residue which is covalently linked to another amino acid residue of the sequence
  MISC_FEATURE (30)..(30): Xaa is alanine, valine, glycine, serine, or an amino acid residue which is covalently linked to another amino acid residue of the sequence
  MISC_FEATURE (31)..(31): Xaa is isoleucine, leucine, valine, phenylalanine, methionine, or an amino acid residue which is covalently linked to another amino acid residue of the sequence
  MISC_FEATURE (32)..(32): Xaa is isoleucine, leucine, valine, phenylalanine, methionine, or an amino acid residue which is covalently linked to another amino acid residue of the sequence
DAEFRHDSGYEVHHQKLVXXAEDXXXXXXXXX

SEQ ID NO: 922 - protein, 31 aa, Artificial Sequence
  synthetic
  MISC_FEATURE (18)..(18): Xaa is phenylalanine, tyrosine, valine, leucine, isoleucine, methionine, or an amino acid residue which is covalently linked to another amino acid residue of the sequence
  MISC_FEATURE (19)..(19): Xaa is phenylalanine, tyrosine, valine, leucine, isoleucine, methionine, or an amino acid residue which is covalently linked to another amino acid residue of the sequence
  MISC_FEATURE (23)..(23): Xaa is valine, leucine, isoleucine, alanine, methionine, or an amino acid residue which is covalently linked to another amino acid residue of the sequence
  MISC_FEATURE (24)..(24): Xaa is glycine, alanine, serine, or an amino acid residue which is covalently linked to another amino acid residue of the sequence
  MISC_FEATURE (25)..(25): Xaa is serine, glycine, alanine, threonine, or an amino acid residue which is covalently linked to another amino acid residue of the sequence
  MISC_FEATURE (26)..(26): Xaa is asparagine, glutamine, methionine, or an amino acid residue which is covalently linked to another amino acid residue of the sequence
  MISC_FEATURE (27)..(27): Xaa is lysine, arginine, or an amino acid residue which is covalently linked to another amino acid residue of the sequence
  MISC_FEATURE (28)..(28): Xaa is glycine, alanine, serine, or an amino acid residue which is covalently linked to another amino acid residue of the sequence
  MISC_FEATURE (29)..(29): Xaa is alanine, valine, glycine, serine, or an amino acid residue which is covalently linked to another amino acid residue of the sequence
  MISC_FEATURE (30)..(30): Xaa is isoleucine, leucine, valine, phenylalanine, methionine, or an amino acid residue which is covalently linked to another amino acid residue of the sequence
  MISC_FEATURE (31)..(31): Xaa is isoleucine, leucine, valine, phenylalanine, methionine, or an amino acid residue which is covalently linked to another amino acid residue of the sequence
AEFRHDSGYEVHHQKLVXXAEDXXXXXXXXX

SEQ ID NO: 923 - protein, 30 aa, Artificial Sequence
  synthetic
  MISC_FEATURE (17)..(17): Xaa is phenylalanine, tyrosine, valine, leucine, isoleucine, methionine, or an amino acid residue which is covalently linked to another amino acid residue of the sequence
  MISC_FEATURE (18)..(18): Xaa is phenylalanine, tyrosine, valine, leucine, isoleucine, methionine, or an amino acid residue which is covalently linked to another amino acid residue of the sequence
  MISC_FEATURE (22)..(22): Xaa is valine, leucine, isoleucine, alanine, methionine, or an amino acid residue which is covalently linked to another amino acid residue of the sequence
  MISC_FEATURE (23)..(23): Xaa is glycine, alanine, serine, or an amino acid residue which is covalently linked to another amino acid residue of the sequence
  MISC_FEATURE (24)..(24): Xaa is serine, glycine, alanine, threonine, or an amino acid residue which is covalently linked to another amino acid residue of the sequence
  MISC_FEATURE (25)..(25): Xaa is asparagine, glutamine, methionine, or an amino acid residue which is covalently linked to another amino acid residue of the sequence
  MISC_FEATURE (26)..(26): Xaa is lysine, arginine, or an amino acid residue which is covalently linked to another amino acid residue of the sequence
  MISC_FEATURE (27)..(27): Xaa is glycine, alanine, serine, or an amino acid residue which is covalently linked to another amino acid residue of the sequence
  MISC_FEATURE (28)..(28): Xaa is alanine, valine, glycine, serine, or an amino acid residue which is covalently linked to another amino acid residue of the sequence
  MISC_FEATURE (29)..(29): Xaa is isoleucine, leucine, valine, phenylalanine, methionine, or an amino acid residue which is covalently linked to another amino acid residue of the sequence
  MISC_FEATURE (30)..(30): Xaa is isoleucine, leucine, valine, phenylalanine, methionine, or an amino acid residue which is covalently linked to another amino acid residue of the sequence
EFRHDSGYEVHHQKLVXXAEDXXXXXXXXX

SEQ ID NO: 924 - protein, 29 aa, Artificial Sequence
  synthetic
  MISC_FEATURE (16)..(16): Xaa is phenylalanine, tyrosine, valine, leucine, isoleucine, methionine, or an amino acid residue which is covalently linked to another amino acid residue of the sequence
  MISC_FEATURE (17)..(17): Xaa is phenylalanine, tyrosine, valine, leucine, isoleucine, methionine, or an amino acid residue which is covalently linked to another amino acid residue of the sequence
  MISC_FEATURE (21)..(21): Xaa is valine, leucine, isoleucine, alanine, methionine, or an amino acid residue which is covalently linked to another amino acid residue of the sequence
  MISC_FEATURE (22)..(22): Xaa is glycine, alanine, serine, or an amino acid residue which is covalently linked to another amino acid residue of the sequence
  MISC_FEATURE (23)..(23): Xaa is serine, glycine, alanine, threonine, or an amino acid residue which is covalently linked to another amino acid residue of the sequence
  MISC_FEATURE (24)..(24): Xaa is asparagine, glutamine, methionine, or an amino acid residue which is covalently linked to another amino acid residue of the sequence
  MISC_FEATURE (25)..(25): Xaa is lysine, arginine, or an amino acid residue which is covalently linked to another amino acid residue of the sequence
  MISC_FEATURE (26)..(26): Xaa is glycine, alanine, serine, or an amino acid residue which is covalently linked to another amino acid residue of the sequence
  MISC_FEATURE (27)..(27): Xaa is alanine, valine, glycine, serine, or an amino acid residue which is covalently linked to another amino acid residue of the sequence
  MISC_FEATURE (28)..(28): Xaa is isoleucine, leucine, valine, phenylalanine, methionine, or an amino acid residue which is covalently linked to another amino acid residue of the sequence
  MISC_FEATURE (29)..(29): Xaa is isoleucine, leucine, valine, phenylalanine, methionine, or an amino acid residue which is covalently linked to another amino acid residue of the sequence
FRHDSGYEVHHQKLVXXAEDXXXXXXXXX

SEQ ID NO: 925 - protein, 28 aa, Artificial Sequence
  synthetic
  MISC_FEATURE (15)..(15): Xaa is phenylalanine, tyrosine, valine, leucine, isoleucine, methionine, or an amino acid residue which is covalently linked to another amino acid residue of the sequence
  MISC_FEATURE (16)..(16): Xaa is phenylalanine, tyrosine, valine, leucine, isoleucine, methionine, or an amino acid residue which is covalently linked to another amino acid residue of the sequence
  MISC_FEATURE (20)..(20): Xaa is valine, leucine, isoleucine, alanine, methionine, or an amino acid residue which is covalently linked to another amino acid residue of the sequence
  MISC_FEATURE (21)..(21): Xaa is glycine, alanine, serine, or an amino acid residue which is covalently linked to another amino acid residue of the sequence
  MISC_FEATURE (22)..(22): Xaa is serine, glycine, alanine, threonine, or an amino acid residue which is covalently linked to another amino acid residue of the sequence
  MISC_FEATURE (23)..(23): Xaa is asparagine, glutamine, methionine, or an amino acid residue which is covalently linked to another amino acid residue of the sequence
  MISC_FEATURE (24)..(24): Xaa is lysine, arginine, or an amino acid residue which is covalently linked to another amino acid residue of the sequence
  MISC_FEATURE (25)..(25): Xaa is glycine, alanine, serine, or an amino acid residue which is covalently linked to another amino acid residue of the sequence
  MISC_FEATURE (26)..(26): Xaa is alanine, valine, glycine, serine, or an amino acid residue which is covalently linked to another amino acid residue of the sequence
  MISC_FEATURE (27)..(27): Xaa is isoleucine, leucine, valine, phenylalanine, methionine, or an amino acid residue which is covalently linked to another amino acid residue of the sequence
  MISC_FEATURE (28)..(28): Xaa is isoleucine, leucine, valine, phenylalanine, methionine, or an amino acid residue which is covalently linked to another amino acid residue of the sequence
RHDSGYEVHHQKLVXXAEDXXXXXXXXX

SEQ ID NO: 926 - protein, 27 aa, Artificial Sequence
  synthetic
  MISC_FEATURE (14)..(14): Xaa is phenylalanine, tyrosine, valine, leucine, isoleucine, methionine, or an amino acid residue which is covalently linked to another amino acid residue of the sequence
  MISC_FEATURE (15)..(15): Xaa is phenylalanine, tyrosine, valine, leucine, isoleucine, methionine, or an amino acid residue which is covalently linked to another amino acid residue of the sequence
  MISC_FEATURE (19)..(19): Xaa is valine, leucine, isoleucine, alanine, methionine, or an amino acid residue which is covalently linked to another amino acid residue of the sequence
  MISC_FEATURE (20)..(20): Xaa is glycine, alanine, serine, or an amino acid residue which is covalently linked to another amino acid residue of the sequence
  MISC_FEATURE (21)..(21): Xaa is serine, glycine, alanine, threonine, or an amino acid residue which is covalently linked to another amino acid residue of the sequence
  MISC_FEATURE (22)..(22): Xaa is asparagine, glutamine, methionine, or an amino acid residue which is covalently linked to another amino acid residue of the sequence
  MISC_FEATURE (23)..(23): Xaa is lysine, arginine, or an amino acid residue which is covalently linked to another amino acid residue of the sequence
  MISC_FEATURE (24)..(24): Xaa is glycine, alanine, serine, or an amino acid residue which is covalently linked to another amino acid residue of the sequence
  MISC_FEATURE (25)..(25): Xaa is alanine, valine, glycine, serine, or an amino acid residue which is covalently linked to another amino acid residue of the sequence
  MISC_FEATURE (26)..(26): Xaa is isoleucine, leucine, valine, phenylalanine, methionine, or an amino acid residue which is covalently linked to another amino acid residue of the sequence
  MISC_FEATURE (27)..(27): Xaa is isoleucine, leucine, valine, phenylalanine, methionine, or an amino acid residue which is covalently linked to another amino acid residue of the sequence
HDSGYEVHHQKLVXXAEDXXXXXXXXX

SEQ ID NO: 927 - protein, 26 aa, Artificial Sequence
  synthetic
  MISC_FEATURE (13)..(13): Xaa is phenylalanine, tyrosine, valine, leucine, isoleucine, methionine, or an amino acid residue which is covalently linked to another amino acid residue of the sequence
  MISC_FEATURE (14)..(14): Xaa is phenylalanine, tyrosine, valine, leucine, isoleucine, methionine, or an amino acid residue which is covalently linked to another amino acid residue of the sequence
  MISC_FEATURE (18)..(18): Xaa is valine, leucine, isoleucine, alanine, methionine, or an amino acid residue which is covalently linked to another amino acid residue of the sequence
  MISC_FEATURE (19)..(19): Xaa is glycine, alanine, serine, or an amino acid residue which is covalently linked to another amino acid residue of the sequence
  MISC_FEATURE (20)..(20): Xaa is serine, glycine, alanine, threonine, or an amino acid residue which is covalently linked to another amino acid residue of the sequence
  MISC_FEATURE (21)..(21): Xaa is asparagine, glutamine, methionine, or an amino acid residue which is covalently linked to another amino acid residue of the sequence
  MISC_FEATURE (22)..(22): Xaa is lysine, arginine, or an amino acid residue which is covalently linked to another amino acid residue of the sequence
  MISC_FEATURE (23)..(23): Xaa is glycine, alanine, serine, or an amino acid residue which is covalently linked to another amino acid residue of the sequence
  MISC_FEATURE (24)..(24): Xaa is alanine, valine, glycine, serine, or an amino acid residue which is covalently linked to another amino acid residue of the sequence
  MISC_FEATURE (25)..(25): Xaa is isoleucine, leucine, valine, phenylalanine, methionine, or an amino acid residue which is covalently linked to another amino acid residue of the sequence
  MISC_FEATURE (26)..(26): Xaa is isoleucine, leucine, valine, phenylalanine, methionine, or an amino acid residue which is covalently linked to another amino acid residue of the sequence
DSGYEVHHQKLVXXAEDXXXXXXXXX

SEQ ID NO: 928 - protein, 25 aa, Artificial Sequence
  synthetic
  MISC_FEATURE (12)..(12): Xaa is phenylalanine, tyrosine, valine, leucine, isoleucine, methionine, or an amino acid residue which is covalently linked to another amino acid residue of the sequence
  MISC_FEATURE (13)..(13): Xaa is phenylalanine, tyrosine, valine, leucine, isoleucine, methionine, or an amino acid residue which is covalently linked to another amino acid residue of the sequence
  MISC_FEATURE (17)..(17): Xaa is valine, leucine, isoleucine, alanine, methionine, or an amino acid residue which is covalently linked to another amino acid residue of the sequence
  MISC_FEATURE (18)..(18): Xaa is glycine, alanine, serine, or an amino acid residue which is covalently linked to another amino acid residue of the sequence
  MISC_FEATURE (19)..(19): Xaa is serine, glycine, alanine, threonine, or an amino acid residue which is covalently linked to another amino acid residue of the sequence
  MISC_FEATURE (20)..(20): Xaa is asparagine, glutamine, methionine, or an amino acid residue which is covalently linked to another amino acid residue of the sequence
  MISC_FEATURE (21)..(21): Xaa is lysine, arginine, or an amino acid residue which is covalently linked to another amino acid residue of the sequence
  MISC_FEATURE (22)..(22): Xaa is glycine, alanine, serine, or an amino acid residue which is covalently linked to another amino acid residue of the sequence
  MISC_FEATURE (23)..(23): Xaa is alanine, valine, glycine, serine, or an amino acid residue which is covalently linked to another amino acid residue of the sequence
  MISC_FEATURE (24)..(24): Xaa is isoleucine, leucine, valine, phenylalanine, methionine, or an amino acid residue which is covalently linked to another amino acid residue of the sequence
  MISC_FEATURE (25)..(25): Xaa is isoleucine, leucine, valine, phenylalanine, methionine, or an amino acid residue which is covalently linked to another amino acid residue of the sequence
SGYEVHHQKLVXXAEDXXXXXXXXX

SEQ ID NO: 929 - protein, 24 aa, Artificial Sequence
  synthetic
  MISC_FEATURE (11)..(11): Xaa is phenylalanine, tyrosine, valine, leucine, isoleucine, methionine, or an amino acid residue which is covalently linked to another amino acid residue of the sequence
  MISC_FEATURE (12)..(12): Xaa is phenylalanine, tyrosine, valine, leucine, isoleucine, methionine, or an amino acid residue which is covalently linked to another amino acid residue of the sequence
  MISC_FEATURE (16)..(16): Xaa is valine, leucine, isoleucine, alanine, methionine, or an amino acid residue which is covalently linked to another amino acid residue of the sequence
  MISC_FEATURE (17)..(17): Xaa is glycine, alanine, serine, or an amino acid residue which is covalently linked to another amino acid residue of the sequence
  MISC_FEATURE (18)..(18): Xaa is serine, glycine, alanine, threonine, or an amino acid residue which is covalently linked to another amino acid residue of the sequence
  MISC_FEATURE (19)..(19): Xaa is asparagine, glutamine, methionine, or an amino acid residue which is covalently linked to another amino acid residue of the sequence
  MISC_FEATURE (20)..(20): Xaa is lysine, arginine, or an amino acid residue which is covalently linked to another amino acid residue of the sequence
  MISC_FEATURE (21)..(21): Xaa is glycine, alanine, serine, or an amino acid residue which is covalently linked to another amino acid residue of the sequence
  MISC_FEATURE (22)..(22): Xaa is alanine, valine, glycine, serine, or an amino acid residue which is covalently linked to another amino acid residue of the sequence
  MISC_FEATURE (23)..(23): Xaa is isoleucine, leucine, valine, phenylalanine, methionine, or an amino acid residue which is covalently linked to another amino acid residue of the sequence
  MISC_FEATURE (24)..(24): Xaa is isoleucine, leucine, valine, phenylalanine, methionine, or an amino acid residue which is covalently linked to another amino acid residue of the sequence
GYEVHHQKLVXXAEDXXXXXXXXX

SEQ ID NO: 930 - protein, 23 aa, Artificial Sequence
  synthetic
  MISC_FEATURE (10)..(10): Xaa is phenylalanine, tyrosine, valine, leucine, isoleucine, methionine, or an amino acid residue which is covalently linked to another amino acid residue of the sequence
  MISC_FEATURE (11)..(11): Xaa is phenylalanine, tyrosine, valine, leucine, isoleucine, methionine, or an amino acid residue which is covalently linked to another amino acid residue of the sequence
  MISC_FEATURE (15)..(15): Xaa is valine, leucine, isoleucine, alanine, methionine, or an amino acid residue which is covalently linked to another amino acid residue of the sequence
  MISC_FEATURE (16)..(16): Xaa is glycine, alanine, serine, or an amino acid residue which is covalently linked to another amino acid residue of the sequence
  MISC_FEATURE (17)..(17): Xaa is serine, glycine, alanine, threonine, or an amino acid residue which is covalently linked to another amino acid residue of the sequence
  MISC_FEATURE (18)..(18): Xaa is asparagine, glutamine, methionine, or an amino acid residue which is covalently linked to another amino acid residue of the sequence
  MISC_FEATURE (19)..(19): Xaa is lysine, arginine, or an amino acid residue which is covalently linked to another amino acid residue of the sequence
  MISC_FEATURE (20)..(20): Xaa is glycine, alanine, serine, or an amino acid residue which is covalently linked to another amino acid residue of the sequence
  MISC_FEATURE (21)..(21): Xaa is alanine, valine, glycine, serine, or an amino acid residue which is covalently linked to another amino acid residue of the sequence
  MISC_FEATURE (22)..(22): Xaa is isoleucine, leucine, valine, phenylalanine, methionine, or an amino acid residue which is covalently linked to another amino acid residue of the sequence
  MISC_FEATURE (23)..(23): Xaa is isoleucine, leucine, valine, phenylalanine, methionine, or an amino acid residue which is covalently linked to another amino acid residue of the sequence
YEVHHQKLVXXAEDXXXXXXXXX

SEQ ID NO: 931 - protein, 22 aa, Artificial Sequence
  synthetic
  MISC_FEATURE (9)..(9): Xaa is phenylalanine, tyrosine, valine, leucine, isoleucine, methionine, or an amino acid residue which is covalently linked to another amino acid residue of the sequence
  MISC_FEATURE (10)..(10): Xaa is phenylalanine, tyrosine, valine, leucine, isoleucine, methionine, or an amino acid residue which is covalently linked to another amino acid residue of the sequence
  MISC_FEATURE (14)..(14): Xaa is valine, leucine, isoleucine, alanine, methionine, or an amino acid residue which is covalently linked to another amino acid residue of the sequence
  MISC_FEATURE (15)..(15): Xaa is glycine, alanine, serine, or an amino acid residue which is covalently linked to another amino acid residue of the sequence
  MISC_FEATURE (16)..(16): Xaa is serine, glycine, alanine, threonine, or an amino acid residue which is covalently linked to another amino acid residue of the sequence
  MISC_FEATURE (17)..(17): Xaa is asparagine, glutamine, methionine, or an amino acid residue which is covalently linked to another amino acid residue of the sequence
  MISC_FEATURE (18)..(18): Xaa is lysine, arginine, or an amino acid residue which is covalently linked to another amino acid residue of the sequence
  MISC_FEATURE (19)..(19): Xaa is glycine, alanine, serine, or an amino acid residue which is covalently linked to another amino acid residue of the sequence
  MISC_FEATURE (20)..(20): Xaa is alanine, valine, glycine, serine, or an amino acid residue which is covalently linked to another amino acid residue of the sequence
  MISC_FEATURE (21)..(21): Xaa is isoleucine, leucine, valine, phenylalanine, methionine, or an amino acid residue which is covalently linked to another amino acid residue of the sequence
  MISC_FEATURE (22)..(22): Xaa is isoleucine, leucine, valine, phenylalanine, methionine, or an amino acid residue which is covalently linked to another amino acid residue of the sequence
EVHHQKLVXXAEDXXXXXXXXX

SEQ ID NO: 932 - protein, 21 aa, Artificial Sequence
  synthetic
  MISC_FEATURE (8)..(8): Xaa is phenylalanine, tyrosine, valine, leucine, isoleucine, methionine, or an amino acid residue which is covalently linked to another amino acid residue of the sequence
  MISC_FEATURE (9)..(9): Xaa is phenylalanine, tyrosine, valine, leucine, isoleucine, methionine, or an amino acid residue which is covalently linked to another amino acid residue of the sequence
  MISC_FEATURE (13)..(13): Xaa is valine, leucine, isoleucine, alanine, methionine, or an amino acid residue which is covalently linked to another amino acid residue of the sequence
  MISC_FEATURE (14)..(14): Xaa is glycine, alanine, serine, or an amino acid residue which is covalently linked to another amino acid residue of the sequence
  MISC_FEATURE (15)..(15): Xaa is serine, glycine, alanine, threonine, or an amino acid residue which is covalently linked to another amino acid residue of the sequence
  MISC_FEATURE (16)..(16): Xaa is asparagine, glutamine, methionine, or an amino acid residue which is covalently linked to another amino acid residue of the sequence
  MISC_FEATURE (17)..(17): Xaa is lysine, arginine, or an amino acid residue which is covalently linked to another amino acid residue of the sequence
  MISC_FEATURE (18)..(18): Xaa is glycine, alanine, serine, or an amino acid residue which is covalently linked to another amino acid residue of the sequence
  MISC_FEATURE (19)..(19): Xaa is alanine, valine, glycine, serine, or an amino acid residue which is covalently linked to another amino acid residue of the sequence
  MISC_FEATURE (20)..(20): Xaa is isoleucine, leucine, valine, phenylalanine, methionine, or an amino acid residue which is covalently linked to another amino acid residue of the sequence
  MISC_FEATURE (21)..(21): Xaa is isoleucine, leucine, valine, phenylalanine, methionine, or an amino acid residue which is covalently linked to another amino acid residue of the sequence
VHHQKLVXXAEDXXXXXXXXX

SEQ ID NO: 933 - protein, 20 aa, Artificial Sequence
  synthetic
  MISC_FEATURE (7)..(7): Xaa is phenylalanine, tyrosine, valine, leucine, isoleucine, methionine, or an amino acid residue which is covalently linked to another amino acid residue of the sequence
  MISC_FEATURE (8)..(8): Xaa is phenylalanine, tyrosine, valine, leucine, isoleucine, methionine, or an amino acid residue which is covalently linked to another amino acid residue of the sequence
  MISC_FEATURE (12)..(12): Xaa is valine, leucine, isoleucine, alanine, methionine, or an amino acid residue which is covalently linked to another amino acid residue of the sequence
  MISC_FEATURE (13)..(13): Xaa is glycine, alanine, serine, or an amino acid residue which is covalently linked to another amino acid residue of the sequence
  MISC_FEATURE (14)..(14): Xaa is serine, glycine, alanine, threonine, or an amino acid residue which is covalently linked to another amino acid residue of the sequence
  MISC_FEATURE (15)..(15): Xaa is asparagine, glutamine, methionine, or an amino acid residue which is covalently linked to another amino acid residue of the sequence
  MISC_FEATURE (16)..(16): Xaa is lysine, arginine, or an amino acid residue which is covalently linked to another amino acid residue of the sequence
  MISC_FEATURE (17)..(17): Xaa is glycine, alanine, serine, or an amino acid residue which is covalently linked to another amino acid residue of the sequence
  MISC_FEATURE (18)..(18): Xaa is alanine, valine, glycine, serine, or an amino acid residue which is covalently linked to another amino acid residue of the sequence
  MISC_FEATURE (19)..(19): Xaa is isoleucine, leucine, valine, phenylalanine, methionine, or an amino acid residue which is covalently linked to another amino acid residue of the sequence
  MISC_FEATURE (20)..(20): Xaa is isoleucine, leucine, valine, phenylalanine, methionine, or an amino acid residue which is covalently linked to another amino acid residue of the sequence
HHQKLVXXAEDXXXXXXXXX

SEQ ID NO: 934 - protein, 19 aa, Artificial Sequence
  synthetic
  MISC_FEATURE (6)..(6): Xaa is phenylalanine, tyrosine, valine, leucine, isoleucine, methionine, or an amino acid residue which is covalently linked to another amino acid residue of the sequence
  MISC_FEATURE (7)..(7): Xaa is phenylalanine, tyrosine, valine, leucine, isoleucine, methionine, or an amino acid residue which is covalently linked to another amino acid residue of the sequence
  MISC_FEATURE (11)..(11): Xaa is valine, leucine, isoleucine, alanine, methionine, or an amino acid residue which is covalently linked to another amino acid residue of the sequence
  MISC_FEATURE (12)..(12): Xaa is glycine, alanine, serine, or an amino acid residue which is covalently linked to another amino acid residue of the sequence
  MISC_FEATURE (13)..(13): Xaa is serine, glycine, alanine, threonine, or an amino acid residue which is covalently linked to another amino acid residue of the sequence
  MISC_FEATURE (14)..(14): Xaa is asparagine, glutamine, methionine, or an amino acid residue which is covalently linked to another amino acid residue of the sequence
  MISC_FEATURE (15)..(15): Xaa is lysine, arginine, or an amino acid residue which is covalently linked to another amino acid residue of the sequence
  MISC_FEATURE (16)..(16): Xaa is glycine, alanine, serine, or an amino acid residue which is covalently linked to another amino acid residue of the sequence
  MISC_FEATURE (17)..(17): Xaa is alanine, valine, glycine, serine, or an amino acid residue which is covalently linked to another amino acid residue of the sequence
  MISC_FEATURE (18)..(18): Xaa is isoleucine, leucine, valine, phenylalanine, methionine, or an amino acid residue which is covalently linked to another amino acid residue of the sequence
  MISC_FEATURE (19)..(19): Xaa is isoleucine, leucine, valine, phenylalanine, methionine, or an amino acid residue which is covalently linked to another amino acid residue of the sequence
HQKLVXXAEDXXXXXXXXX

SEQ ID NO: 935 - protein, 18 aa, Artificial Sequence
  synthetic
  MISC_FEATURE (5)..(5): Xaa is phenylalanine, tyrosine, valine, leucine, isoleucine, methionine, or an amino acid residue which is covalently linked to another amino acid residue of the sequence
  MISC_FEATURE (6)..(6): Xaa is phenylalanine, tyrosine, valine, leucine, isoleucine, methionine, or an amino acid residue which is covalently linked to another amino acid residue of the sequence
  MISC_FEATURE (10)..(10): Xaa is valine, leucine, isoleucine, alanine, methionine, or an amino acid residue which is covalently linked to another amino acid residue of the sequence
  MISC_FEATURE (11)..(11): Xaa is glycine, alanine, serine, or an amino acid residue which is covalently linked to another amino acid residue of the sequence
  MISC_FEATURE (12)..(12): Xaa is serine, glycine, alanine, threonine, or an amino acid residue which is covalently linked to another amino acid residue of the sequence
  MISC_FEATURE (13)..(13): Xaa is asparagine, glutamine, methionine, or an amino acid residue which is covalently linked to another amino acid residue of the sequence
  MISC_FEATURE (14)..(14): Xaa is lysine, arginine, or an amino acid residue which is covalently linked to another amino acid residue of the sequence
  MISC_FEATURE (15)..(15): Xaa is glycine, alanine, serine, or an amino acid residue which is covalently linked to another amino acid residue of the sequence
  MISC_FEATURE (16)..(16): Xaa is alanine, valine, glycine, serine, or an amino acid residue which is covalently linked to another amino acid residue of the sequence
  MISC_FEATURE (17)..(17): Xaa is isoleucine, leucine, valine, phenylalanine, methionine, or an amino acid residue which is covalently linked to another amino acid residue of the sequence
  MISC_FEATURE (18)..(18): Xaa is isoleucine, leucine, valine, phenylalanine, methionine, or an amino acid residue which is covalently linked to another amino acid residue of the sequence
QKLVXXAEDXXXXXXXXX

SEQ ID NO: 936 - protein, 17 aa, Artificial Sequence
  synthetic
  MISC_FEATURE (4)..(4): Xaa is phenylalanine, tyrosine, valine, leucine, isoleucine, methionine, or an amino acid residue which is covalently linked to another amino acid residue of the sequence
  MISC_FEATURE (5)..(5): Xaa is phenylalanine, tyrosine, valine, leucine, isoleucine, methionine, or an amino acid residue which is covalently linked to another amino acid residue of the sequence
  MISC_FEATURE (9)..(9): Xaa is valine, leucine, isoleucine, alanine, methionine, or an amino acid residue which is covalently linked to another amino acid residue of the sequence
  MISC_FEATURE (10)..(10): Xaa is glycine, alanine, serine, or an amino acid residue which is covalently linked to another amino acid residue of the sequence
  MISC_FEATURE (11)..(11): Xaa is serine, glycine, alanine, threonine, or an amino acid residue which is covalently linked to another amino acid residue of the sequence
  MISC_FEATURE (12)..(12): Xaa is asparagine, glutamine, methionine, or an amino acid residue which is covalently linked to another amino acid residue of the sequence
  MISC_FEATURE (13)..(13): Xaa is lysine, arginine, or an amino acid residue which is covalently linked to another amino acid residue of the sequence
  MISC_FEATURE (14)..(14): Xaa is glycine, alanine, serine, or an amino acid residue which is covalently linked to another amino acid residue of the sequence
  MISC_FEATURE (15)..(15): Xaa is alanine, valine, glycine, serine, or an amino acid residue which is covalently linked to another amino acid residue of the sequence
  MISC_FEATURE (16)..(16): Xaa is isoleucine, leucine, valine, phenylalanine, methionine, or an amino acid residue which is covalently linked to another amino acid residue of the sequence
  MISC_FEATURE (17)..(17): Xaa is isoleucine, leucine, valine, phenylalanine, methionine, or an amino acid residue which is covalently linked to another amino acid residue of the sequence
KLVXXAEDXXXXXXXXX

SEQ ID NO: 937 - protein, 16 aa, Artificial Sequence
  synthetic
  MISC_FEATURE (3)..(19): Xaa is phenylalanine, tyrosine, valine, leucine, isoleucine, methionine, or an amino acid residue which is covalently linked to another amino acid residue of the sequence
  MISC_FEATURE (4)..(20): Xaa is phenylalanine, tyrosine, valine, leucine, isoleucine, methionine, or an amino acid residue which is covalently linked to another amino acid residue of the sequence
  MISC_FEATURE (8)..(8): Xaa is valine, leucine, isoleucine, alanine, methionine, or an amino acid residue which is covalently linked to another amino acid residue of the sequence
  MISC_FEATURE (9)..(9): Xaa is glycine, alanine, serine, or an amino acid residue which is covalently linked to another amino acid residue of the sequence
  MISC_FEATURE (10)..(10): Xaa is serine, glycine, alanine, threonine, or an amino acid residue which is covalently linked to another amino acid residue of the sequence
  MISC_FEATURE (11)..(11): Xaa is asparagine, glutamine, methionine, or an amino acid residue which is covalently linked to another amino acid residue of the sequence
  MISC_FEATURE (12)..(12): Xaa is lysine, arginine, or an amino acid residue which is covalently linked to another amino acid residue of the sequence
  MISC_FEATURE (13)..(13): Xaa is glycine, alanine, serine, or an amino acid residue which is covalently linked to another amino acid residue of the sequence
  MISC_FEATURE (14)..(14): Xaa is alanine, valine, glycine, serine, or an amino acid residue which is covalently linked to another amino acid residue of the sequence
  MISC_FEATURE (15)..(15): Xaa is isoleucine, leucine, valine, phenylalanine, methionine, or an amino acid residue which is covalently linked to another amino acid residue of the sequence
  MISC_FEATURE (16)..(16): Xaa is isoleucine, leucine, valine, phenylalanine, methionine, or an amino acid residue which is covalently linked to another amino acid residue of the sequence
LVXXAEDXXXXXXXXX

SEQ ID NO: 938 - protein, 15 aa, Artificial Sequence
  synthetic
  MISC_FEATURE (2)..(2): Xaa is phenylalanine, tyrosine, valine, leucine, isoleucine, methionine, or an amino acid residue which is covalently linked to another amino acid residue of the sequence
  MISC_FEATURE (3)..(3): Xaa is phenylalanine, tyrosine, valine, leucine, isoleucine, methionine, or an amino acid residue which is covalently linked to another amino acid residue of the sequence
  MISC_FEATURE (7)..(7): Xaa is valine, leucine, isoleucine, alanine, methionine, or an amino acid residue which is covalently linked to another amino acid residue of the sequence
  MISC_FEATURE (8)..(8): Xaa is glycine, alanine, serine, or an amino acid residue which is covalently linked to another amino acid residue of the sequence
  MISC_FEATURE (9)..(9): Xaa is serine, glycine, alanine, threonine, or an amino acid residue which is covalently linked to another amino acid residue of the sequence
  MISC_FEATURE (10)..(10): Xaa is asparagine, glutamine, methionine, or an amino acid residue which is covalently linked to another amino acid residue of the sequence
  MISC_FEATURE (11)..(11): Xaa is lysine, arginine, or an amino acid residue which is covalently linked to another amino acid residue of the sequence
  MISC_FEATURE (12)..(12): Xaa is glycine, alanine, serine, or an amino acid residue which is covalently linked to another amino acid residue of the sequence
  MISC_FEATURE (13)..(13): Xaa is alanine, valine, glycine, serine, or an amino acid residue which is covalently linked to another amino acid residue of the sequence
  MISC_FEATURE (14)..(14): Xaa is isoleucine, leucine, valine, phenylalanine, methionine, or an amino acid residue which is covalently linked to another amino acid residue of the sequence
  MISC_FEATURE (15)..(15): Xaa is isoleucine, leucine, valine, phenylalanine, methionine, or an amino acid residue which is covalently linked to another amino acid residue of the sequence
VXXAEDXXXXXXXXX

SEQ ID NO: 939 - protein, 14 aa, Artificial Sequence
  synthetic
  MISC_FEATURE (1)..(1): Xaa is phenylalanine, tyrosine, valine, leucine, isoleucine, methionine, or an amino acid residue which is covalently linked to another amino acid residue of the sequence
  MISC_FEATURE (2)..(2): Xaa is phenylalanine, tyrosine, valine, leucine, isoleucine, methionine, or an amino acid residue which is covalently linked to another amino acid residue of the sequence
  MISC_FEATURE (6)..(6): Xaa is valine, leucine, isoleucine, alanine, methionine, or an amino acid residue which is covalently linked to another amino acid residue of the sequence
  MISC_FEATURE (7)..(7): Xaa is glycine, alanine, serine, or an amino acid residue which is covalently linked to another amino acid residue of the sequence
  MISC_FEATURE (8)..(8): Xaa is serine, glycine, alanine, threonine, or an amino acid residue which is covalently linked to another amino acid residue of the sequence
  MISC_FEATURE (9)..(9): Xaa is asparagine, glutamine, methionine, or an amino acid residue which is covalently linked to another amino acid residue of the sequence
  MISC_FEATURE (10)..(10): Xaa is lysine, arginine, or an amino acid residue which is covalently linked to another amino acid residue of the sequence
  MISC_FEATURE (11)..(11): Xaa is glycine, alanine, serine, or an amino acid residue which is covalently linked to another amino acid residue of the sequence
  MISC_FEATURE (12)..(12): Xaa is alanine, valine, glycine, serine, or an amino acid residue which is covalently linked to another amino acid residue of the sequence
  MISC_FEATURE (13)..(13): Xaa is isoleucine, leucine, valine, phenylalanine, methionine, or an amino acid residue which is covalently linked to another amino acid residue of the sequence
  MISC_FEATURE (14)..(14): Xaa is isoleucine, leucine, valine, phenylalanine, methionine, or an amino acid residue which is covalently linked to another amino acid residue of the sequence
XXAEDXXXXXXXXX

SEQ ID NO: 940 - protein, 13 aa, Artificial Sequence
  synthetic
  MISC_FEATURE (1)..(1): Xaa is phenylalanine, tyrosine, valine, leucine, isoleucine, methionine, or an amino acid residue which is covalently linked to another amino acid residue of the sequence
  MISC_FEATURE (5)..(5): Xaa is valine, leucine, isoleucine, alanine, methionine, or an amino acid residue which is covalently linked to another amino acid residue of the sequence
  MISC_FEATURE (6)..(6): Xaa is glycine, alanine, serine, or an amino acid residue which is covalently linked to another amino acid residue of the sequence
  MISC_FEATURE (7)..(7): Xaa is serine, glycine, alanine, threonine, or an amino acid residue which is covalently linked to another amino acid residue of the sequence
  MISC_FEATURE (8)..(8): Xaa is asparagine, glutamine, methionine, or an amino acid residue which is covalently linked to another amino acid residue of the sequence
  MISC_FEATURE (9)..(9): Xaa is lysine, arginine, or an amino acid residue which is covalently linked to another amino acid residue of the sequence
  MISC_FEATURE (10)..(10): Xaa is glycine, alanine, serine, or an amino acid residue which is covalently linked to another amino acid residue of the sequence
  MISC_FEATURE (11)..(11): Xaa is alanine, valine, glycine, serine, or an amino acid residue which is covalently linked to another amino acid residue of the sequence
  MISC_FEATURE (12)..(12): Xaa is isoleucine, leucine, valine, phenylalanine, methionine, or an amino acid residue which is covalently linked to another amino acid residue of the sequence
XAEDXXXXXXXXI

SEQ ID NO: 941 - protein, 31 aa, Artificial Sequence
  synthetic
  MISC_FEATURE (20)..(20): Xaa is phenylalanine, tyrosine, valine, leucine, isoleucine, methionine, or an amino acid residue which is covalently linked to another amino acid residue of the sequence
  MISC_FEATURE (24)..(24): Xaa is valine, leucine, isoleucine, alanine, methionine, or an amino acid residue which is covalently linked to another amino acid residue of the sequence
  MISC_FEATURE (25)..(25): Xaa is glycine, alanine, serine, or an amino acid residue which is covalently linked to another amino acid residue of the sequence
  MISC_FEATURE (26)..(26): Xaa is serine, glycine, alanine, threonine, or an amino acid residue which is covalently linked to another amino acid residue of the sequence
  MISC_FEATURE (27)..(27): Xaa is asparagine, glutamine, methionine, or an amino acid residue which is covalently linked to another amino acid residue of the sequence
  MISC_FEATURE (28)..(28): Xaa is lysine, arginine, or an amino acid residue which is covalently linked to another amino acid residue of the sequence
  MISC_FEATURE (29)..(29): Xaa is glycine, alanine, serine, or an amino acid residue which is covalently linked to another amino acid residue of the sequence
  MISC_FEATURE (30)..(30): Xaa is alanine, valine, glycine, serine, or an amino acid residue which is covalently linked to another amino acid residue of the sequence
  MISC_FEATURE (31)..(31): Xaa is isoleucine, leucine, valine, phenylalanine, methionine, or an amino acid residue which is covalently linked to another amino acid residue of the sequence
DAEFRHDSGYEVHHQKLVFXAEDXXXXXXXX

SEQ ID NO: 942 - protein, 30 aa, Artificial Sequence
  synthetic
  MISC_FEATURE (19)..(19): Xaa is phenylalanine, tyrosine, valine, leucine, isoleucine, methionine, or an amino acid residue which is covalently linked to another amino acid residue of the sequence
  MISC_FEATURE (23)..(23): Xaa is valine, leucine, isoleucine, alanine, methionine, or an amino acid residue which is covalently linked to another amino acid residue of the sequence
  MISC_FEATURE (24)..(24): Xaa is glycine, alanine, serine, or an amino acid residue which is covalently linked to another amino acid residue of the sequence
  MISC_FEATURE (25)..(25): Xaa is serine, glycine, alanine, threonine, or an amino acid residue which is covalently linked to another amino acid residue of the sequence
  MISC_FEATURE (26)..(26): Xaa is asparagine, glutamine, methionine, or an amino acid residue which is covalently linked to another amino acid residue of the sequence
  MISC_FEATURE (27)..(27): Xaa is lysine, arginine, or an amino acid residue which is covalently linked to another amino acid residue of the sequence
  MISC_FEATURE (28)..(28): Xaa is glycine, alanine, serine, or an amino acid residue which is covalently linked to another amino acid residue of the sequence
  MISC_FEATURE (29)..(29): Xaa is alanine, valine, glycine, serine, or an amino acid residue which is covalently linked to another amino acid residue of the sequence
  MISC_FEATURE (30)..(30): Xaa is isoleucine, leucine, valine, phenylalanine, methionine, or an amino acid residue which is covalently linked to another amino acid residue of the sequence
AEFRHDSGYEVHHQKLVFXAEDXXXXXXXX

SEQ ID NO: 943 - protein, 29 aa, Artificial Sequence
  synthetic
  MISC_FEATURE (18)..(18): Xaa is phenylalanine, tyrosine, valine, leucine, isoleucine, methionine, or an amino acid residue which is covalently linked to another amino acid residue of the sequence
  MISC_FEATURE (22)..(22): Xaa is valine, leucine, isoleucine, alanine, methionine, or an amino acid residue which is covalently linked to another amino acid residue of the sequence
  MISC_FEATURE (23)..(23): Xaa is glycine, alanine, serine, or an amino acid residue which is covalently linked to another amino acid residue of the sequence
  MISC_FEATURE (24)..(24): Xaa is serine, glycine, alanine, threonine, or an amino acid residue which is covalently linked to another amino acid residue of the sequence
  MISC_FEATURE (25)..(25): Xaa is asparagine, glutamine, methionine, or an amino acid residue which is covalently linked to another amino acid residue of the sequence
  MISC_FEATURE (26)..(26): Xaa is lysine, arginine, or an amino acid residue which is covalently linked to another amino acid residue of the sequence
  MISC_FEATURE (27)..(27): Xaa is glycine, alanine, serine, or an amino acid residue which is covalently linked to another amino acid residue of the sequence
  MISC_FEATURE (28)..(28): Xaa is alanine, valine, glycine, serine, or an amino acid residue which is covalently linked to another amino acid residue of the sequence
  MISC_FEATURE (29)..(29): Xaa is isoleucine, leucine, valine, phenylalanine, methionine, or an amino acid residue which is covalently linked to another amino acid residue of the sequence
EFRHDSGYEVHHQKLVFXAEDXXXXXXXX

SEQ ID NO: 944 - protein, 28 aa, Artificial Sequence
  synthetic
  MISC_FEATURE (17)..(17): Xaa is phenylalanine, tyrosine, valine, leucine, isoleucine, methionine, or an amino acid residue which is covalently linked to another amino acid residue of the sequence
  MISC_FEATURE (21)..(21): Xaa is valine, leucine, isoleucine, alanine, methionine, or an amino acid residue which is covalently linked to another amino acid residue of the sequence
  MISC_FEATURE (22)..(22): Xaa is glycine, alanine, serine, or an amino acid residue which is covalently linked to another amino acid residue of the sequence
  MISC_FEATURE (23)..(23): Xaa is serine, glycine, alanine, threonine, or an amino acid residue which is covalently linked to another amino acid residue of the sequence
  MISC_FEATURE (24)..(24): Xaa is asparagine, glutamine, methionine, or an amino acid residue which is covalently linked to another amino acid residue of the sequence
  MISC_FEATURE (25)..(25): Xaa is lysine, arginine, or an amino acid residue which is covalently linked to another amino acid residue of the sequence
  MISC_FEATURE (26)..(26): Xaa is glycine, alanine, serine, or an amino acid residue which is covalently linked to another amino acid residue of the sequence
  MISC_FEATURE (27)..(27): Xaa is alanine, valine, glycine, serine, or an amino acid residue which is covalently linked to another amino acid residue of the sequence
  MISC_FEATURE (28)..(28): Xaa is isoleucine, leucine, valine, phenylalanine, methionine, or an amino acid residue which is covalently linked to another amino acid residue of the sequence
FRHDSGYEVHHQKLVFXAEDXXXXXXXX

SEQ ID NO: 945 - protein, 27 aa, Artificial Sequence
  synthetic
  MISC_FEATURE (16)..(16): Xaa is phenylalanine, tyrosine, valine, leucine, isoleucine, methionine, or an amino acid residue which is covalently linked to another amino acid residue of the sequence
  MISC_FEATURE (20)..(20): Xaa is valine, leucine, isoleucine, alanine, methionine, or an amino acid residue which is covalently linked to another amino acid residue of the sequence
  MISC_FEATURE (21)..(21): Xaa is glycine, alanine, serine, or an amino acid residue which is covalently linked to another amino acid residue of the sequence
  MISC_FEATURE (22)..(22): Xaa is serine, glycine, alanine, threonine, or an amino acid residue which is covalently linked to another amino acid residue of the sequence
  MISC_FEATURE (23)..(23): Xaa is asparagine, glutamine, methionine, or an amino acid residue which is covalently linked to another amino acid residue of the sequence
  MISC_FEATURE (24)..(24): Xaa is lysine, arginine, or an amino acid residue which is covalently linked to another amino acid residue of the sequence
  MISC_FEATURE (25)..(25): Xaa is glycine, alanine, serine, or an amino acid residue which is covalently linked to another amino acid residue of the sequence
  MISC_FEATURE (26)..(26): Xaa is alanine, valine, glycine, serine, or an amino acid residue which is covalently linked to another amino acid residue of the sequence
  MISC_FEATURE (27)..(27): Xaa is isoleucine, leucine, valine, phenylalanine, methionine, or an amino acid residue which is covalently linked to another amino acid residue of the sequence
RHDSGYEVHHQKLVFXAEDXXXXXXXX

SEQ ID NO: 946 - protein, 26 aa, Artificial Sequence
  synthetic
  MISC_FEATURE (15)..(15): Xaa is phenylalanine, tyrosine, valine, leucine, isoleucine, methionine, or an amino acid residue which is covalently linked to another amino acid residue of the sequence
  MISC_FEATURE (19)..(19): Xaa is valine, leucine, isoleucine, alanine, methionine, or an amino acid residue which is covalently linked to another amino acid residue of the sequence
  MISC_FEATURE (20)..(20): Xaa is glycine, alanine, serine, or an amino acid residue which is covalently linked to another amino acid residue of the sequence
  MISC_FEATURE (21)..(21): Xaa is serine, glycine, alanine, threonine, or an amino acid residue which is covalently linked to another amino acid residue of the sequence
  MISC_FEATURE (22)..(22): Xaa is asparagine, glutamine, methionine, or an amino acid residue which is covalently linked to another amino acid residue of the sequence
  MISC_FEATURE (23)..(23): Xaa is lysine, arginine, or an amino acid residue which is covalently linked to another amino acid residue of the sequence
  MISC_FEATURE (24)..(24): Xaa is glycine, alanine, serine, or an amino acid residue which is covalently linked to another amino acid residue of the sequence
  MISC_FEATURE (25)..(25): Xaa is alanine, valine, glycine, serine, or an amino acid residue which is covalently linked to another amino acid residue of the sequence
  MISC_FEATURE (26)..(26): Xaa is isoleucine, leucine, valine, phenylalanine, methionine, or an amino acid residue which is covalently linked to another amino acid residue of the sequence
HDSGYEVHHQKLVFXAEDXXXXXXXX

SEQ ID NO: 947 - protein, 25 aa, Artificial Sequence
  synthetic
  MISC_FEATURE (14)..(14): Xaa is phenylalanine, tyrosine, valine, leucine, isoleucine, methionine, or an amino acid residue which is covalently linked to another amino acid residue of the sequence
  MISC_FEATURE (18)..(18): Xaa is valine, leucine, isoleucine, alanine, methionine, or an amino acid residue which is covalently linked to another amino acid residue of the sequence
  MISC_FEATURE (19)..(19): Xaa is glycine, alanine, serine, or an amino acid residue which is covalently linked to another amino acid residue of the sequence
  MISC_FEATURE (20)..(20): Xaa is serine, glycine, alanine, threonine, or an amino acid residue which is covalently linked to another amino acid residue of the sequence
  MISC_FEATURE (21)..(21): Xaa is asparagine, glutamine, methionine, or an amino acid residue which is covalently linked to another amino acid residue of the sequence
  MISC_FEATURE (22)..(22): Xaa is lysine, arginine, or an amino acid residue which is covalently linked to another amino acid residue of the sequence
  MISC_FEATURE (23)..(23): Xaa is glycine, alanine, serine, or an amino acid residue which is covalently linked to another amino acid residue of the sequence
  MISC_FEATURE (24)..(24): Xaa is alanine, valine, glycine, serine, or an amino acid residue which is covalently linked to another amino acid residue of the sequence
  MISC_FEATURE (25)..(25): Xaa is isoleucine, leucine, valine, phenylalanine, methionine, or an amino acid residue which is covalently linked to another amino acid residue of the sequence
DSGYEVHHQKLVFXAEDXXXXXXXX

SEQ ID NO: 948 - protein, 24 aa, Artificial Sequence
  synthetic
  MISC_FEATURE (13)..(13): Xaa is phenylalanine, tyrosine, valine, leucine, isoleucine, methionine, or an amino acid residue which is covalently linked to another amino acid residue of the sequence
  MISC_FEATURE (17)..(17): Xaa is valine, leucine, isoleucine, alanine, methionine, or an amino acid residue which is covalently linked to another amino acid residue of the sequence
  MISC_FEATURE (18)..(18): Xaa is glycine, alanine, serine, or an amino acid residue which is covalently linked to another amino acid residue of the sequence
  MISC_FEATURE (19)..(19): Xaa is serine, glycine, alanine, threonine, or an amino acid residue which is covalently linked to another amino acid residue of the sequence
  MISC_FEATURE (20)..(20): Xaa is asparagine, glutamine, methionine, or an amino acid residue which is covalently linked to another amino acid residue of the sequence
  MISC_FEATURE (21)..(21): Xaa is lysine, arginine, or an amino acid residue which is covalently linked to another amino acid residue of the sequence
  MISC_FEATURE (22)..(22): Xaa is glycine, alanine, serine, or an amino acid residue which is covalently linked to another amino acid residue of the sequence
  MISC_FEATURE (23)..(23): Xaa is alanine, valine, glycine, serine, or an amino acid residue which is covalently linked to another amino acid residue of the sequence
  MISC_FEATURE (24)..(24): Xaa is isoleucine, leucine, valine, phenylalanine, methionine, or an amino acid residue which is covalently linked to another amino acid residue of the sequence
SGYEVHHQKLVFXAEDXXXXXXXX

SEQ ID NO: 949 - protein, 23 aa, Artificial Sequence
  synthetic
  MISC_FEATURE (12)..(12): Xaa is phenylalanine, tyrosine, valine, leucine, isoleucine, methionine, or an amino acid residue which is covalently linked to another amino acid residue of the sequence
  MISC_FEATURE (16)..(16): Xaa is valine, leucine, isoleucine, alanine, methionine, or an amino acid residue which is covalently linked to another amino acid residue of the sequence
  MISC_FEATURE (17)..(17): Xaa is glycine, alanine, serine, or an amino acid residue which is covalently linked to another amino acid residue of the sequence
  MISC_FEATURE (18)..(18): Xaa is serine, glycine, alanine, threonine, or an amino acid residue which is covalently linked to another amino acid residue of the sequence
  MISC_FEATURE (19)..(19): Xaa is asparagine, glutamine, methionine, or an amino acid residue which is covalently linked to another amino acid residue of the sequence
  MISC_FEATURE (20)..(20): Xaa is lysine, arginine, or an amino acid residue which is covalently linked to another amino acid residue of the sequence
  MISC_FEATURE (21)..(21): Xaa is glycine, alanine, serine, or an amino acid residue which is covalently linked to another amino acid residue of the sequence
  MISC_FEATURE (22)..(22): Xaa is alanine, valine, glycine, serine, or an amino acid residue which is covalently linked to another amino acid residue of the sequence
  MISC_FEATURE (23)..(23): Xaa is isoleucine, leucine, valine, phenylalanine, methionine, or an amino acid residue which is covalently linked to another amino acid residue of the sequence
GYEVHHQKLVFXAEDXXXXXXXX

SEQ ID NO: 950 - protein, 22 aa, Artificial Sequence
  synthetic
  MISC_FEATURE (11)..(11): Xaa is phenylalanine, tyrosine, valine, leucine, isoleucine, methionine, or an amino acid residue which is covalently linked to another amino acid residue of the sequence
  MISC_FEATURE (15)..(15): Xaa is valine, leucine, isoleucine, alanine, methionine, or an amino acid residue which is covalently linked to another amino acid residue of the sequence
  MISC_FEATURE (16)..(16): Xaa is glycine, alanine, serine, or an amino acid residue which is covalently linked to another amino acid residue of the sequence
  MISC_FEATURE (17)..(17): Xaa is serine, glycine, alanine, threonine, or an amino acid residue which is covalently linked to another amino acid residue of the sequence
  MISC_FEATURE (18)..(18): Xaa is asparagine, glutamine, methionine, or an amino acid residue which is covalently linked to another amino acid residue of the sequence
  MISC_FEATURE (19)..(19): Xaa is lysine, arginine, or an amino acid residue which is covalently linked to another amino acid residue of the sequence
  MISC_FEATURE (20)..(20): Xaa is glycine, alanine, serine, or an amino acid residue which is covalently linked to another amino acid residue of the sequence
  MISC_FEATURE (21)..(21): Xaa is alanine, valine, glycine, serine, or an amino acid residue which is covalently linked to another amino acid residue of the sequence
  MISC_FEATURE (22)..(22): Xaa is isoleucine, leucine, valine, phenylalanine, methionine, or an amino acid residue which is covalently linked to another amino acid residue of the sequence
YEVHHQKLVFXAEDXXXXXXXX

SEQ ID NO: 951 - protein, 21 aa, Artificial Sequence
  synthetic
  MISC_FEATURE (10)..(10): Xaa is phenylalanine, tyrosine, valine, leucine, isoleucine, methionine, or an amino acid residue which is covalently linked to another amino acid residue of the sequence
  MISC_FEATURE (14)..(14): Xaa is valine, leucine, isoleucine, alanine, methionine, or an amino acid residue which is covalently linked to another amino acid residue of the sequence
  MISC_FEATURE (15)..(15): Xaa is glycine, alanine, serine, or an amino acid residue which is covalently linked to another amino acid residue of the sequence
  MISC_FEATURE (16)..(16): Xaa is serine, glycine, alanine, threonine, or an amino acid residue which is covalently linked to another amino acid residue of the sequence
  MISC_FEATURE (17)..(17): Xaa is asparagine, glutamine, methionine, or an amino acid residue which is covalently linked to another amino acid residue of the sequence
  MISC_FEATURE (18)..(18): Xaa is lysine, arginine, or an amino acid residue which is covalently linked to another amino acid residue of the sequence
  MISC_FEATURE (19)..(19): Xaa is glycine, alanine, serine, or an amino acid residue which is covalently linked to another amino acid residue of the sequence
  MISC_FEATURE (20)..(20): Xaa is alanine, valine, glycine, serine, or an amino acid residue which is covalently linked to another amino acid residue of the sequence
  MISC_FEATURE (21)..(21): Xaa is isoleucine, leucine, valine, phenylalanine, methionine, or an amino acid residue which is covalently linked to another amino acid residue of the sequence
EVHHQKLVFXAEDXXXXXXXX

SEQ ID NO: 952 - protein, 20 aa, Artificial Sequence
  synthetic
  MISC_FEATURE (9)..(9): Xaa is phenylalanine, tyrosine, valine, leucine, isoleucine, methionine, or an amino acid residue which is covalently linked to another amino acid residue of the sequence
  MISC_FEATURE (13)..(13): Xaa is valine, leucine, isoleucine, alanine, methionine, or an amino acid residue which is covalently linked to another amino acid residue of the sequence
  MISC_FEATURE (14)..(14): Xaa is glycine, alanine, serine, or an amino acid residue which is covalently linked to another amino acid residue of the sequence
  MISC_FEATURE (15)..(15): Xaa is serine, glycine, alanine, threonine, or an amino acid residue which is covalently linked to another amino acid residue of the sequence
  MISC_FEATURE (16)..(16): Xaa is asparagine, glutamine, methionine, or an amino acid residue which is covalently linked to another amino acid residue of the sequence
  MISC_FEATURE (17)..(17): Xaa is lysine, arginine, or an amino acid residue which is covalently linked to another amino acid residue of the sequence
  MISC_FEATURE (18)..(18): Xaa is glycine, alanine, serine, or an amino acid residue which is covalently linked to another amino acid residue of the sequence
  MISC_FEATURE (19)..(19): Xaa is alanine, valine, glycine, serine, or an amino acid residue which is covalently linked to another amino acid residue of the sequence
  MISC_FEATURE (20)..(20): Xaa is isoleucine, leucine, valine, phenylalanine, methionine, or an amino acid residue which is covalently linked to another amino acid residue of the sequence
VHHQKLVFXAEDXXXXXXXX

SEQ ID NO: 953 - protein, 19 aa, Artificial Sequence
  synthetic
  MISC_FEATURE (8)..(8): Xaa is phenylalanine, tyrosine, valine, leucine, isoleucine, methionine, or an amino acid residue which is covalently linked to another amino acid residue of the sequence
  MISC_FEATURE (12)..(12): Xaa is valine, leucine, isoleucine, alanine, methionine, or an amino acid residue which is covalently linked to another amino acid residue of the sequence
  MISC_FEATURE (13)..(13): Xaa is glycine, alanine, serine, or an amino acid residue which is covalently linked to another amino acid residue of the sequence
  MISC_FEATURE (14)..(14): Xaa is serine, glycine, alanine, threonine, or an amino acid residue which is covalently linked to another amino acid residue of the sequence
  MISC_FEATURE (15)..(15): Xaa is asparagine, glutamine, methionine, or an amino acid residue which is covalently linked to another amino acid residue of the sequence
  MISC_FEATURE (16)..(16): Xaa is lysine, arginine, or an amino acid residue which is covalently linked to another amino acid residue of the sequence
  MISC_FEATURE (17)..(17): Xaa is glycine, alanine, serine, or an amino acid residue which is covalently linked to another amino acid residue of the sequence
  MISC_FEATURE (18)..(18): Xaa is alanine, valine, glycine, serine, or an amino acid residue which is covalently linked to another amino acid residue of the sequence
  MISC_FEATURE (19)..(19): Xaa is isoleucine, leucine, valine, phenylalanine, methionine, or an amino acid residue which is covalently linked to another amino acid residue of the sequence
HHQKLVFXAEDXXXXXXXX

SEQ ID NO: 954 - protein, 18 aa, Artificial Sequence
  synthetic
  MISC_FEATURE (7)..(20): Xaa is phenylalanine, tyrosine, valine, leucine, isoleucine, methionine, or an amino acid residue which is covalently linked to another amino acid residue of the sequence
  MISC_FEATURE (11)..(11): Xaa is valine, leucine, isoleucine, alanine, methionine, or an amino acid residue which is covalently linked to another amino acid residue of the sequence
  MISC_FEATURE (12)..(12): Xaa is glycine, alanine, serine, or an amino acid residue which is covalently linked to another amino acid residue of the sequence
  MISC_FEATURE (13)..(13): Xaa is serine, glycine, alanine, threonine, or an amino acid residue which is covalently linked to another amino acid residue of the sequence
  MISC_FEATURE (14)..(14): Xaa is asparagine, glutamine, methionine, or an amino acid residue which is covalently linked to another amino acid residue of the sequence
  MISC_FEATURE (15)..(15): Xaa is lysine, arginine, or an amino acid residue which is covalently linked to another amino acid residue of the sequence
  MISC_FEATURE (16)..(16): Xaa is glycine, alanine, serine, or an amino acid residue which is covalently linked to another amino acid residue of the sequence
  MISC_FEATURE (17)..(17): Xaa is alanine, valine, glycine, serine, or an amino acid residue which is covalently linked to another amino acid residue of the sequence
  MISC_FEATURE (18)..(18): Xaa is isoleucine, leucine, valine, phenylalanine, methionine, or an amino acid residue which is covalently linked to another amino acid residue of the sequence
HQKLVFXAEDXXXXXXXX

SEQ ID NO: 955 - protein, 17 aa, Artificial Sequence
  synthetic
  MISC_FEATURE (6)..(6): Xaa is phenylalanine, tyrosine, valine, leucine, isoleucine, methionine, or an amino acid residue which is covalently linked to another amino acid residue of the sequence
  MISC_FEATURE (10)..(10): Xaa is valine, leucine, isoleucine, alanine, methionine, or an amino acid residue which is covalently linked to another amino acid residue of the sequence
  MISC_FEATURE (11)..(11): Xaa is glycine, alanine, serine, or an amino acid residue which is covalently linked to another amino acid residue of the sequence
  MISC_FEATURE (12)..(12): Xaa is serine, glycine, alanine, threonine, or an amino acid residue which is covalently linked to another amino acid residue of the sequence
  MISC_FEATURE (13)..(13): Xaa is asparagine, glutamine, methionine, or an amino acid residue which is covalently linked to another amino acid residue of the sequence
  MISC_FEATURE (14)..(14): Xaa is lysine, arginine, or an amino acid residue which is covalently linked to another amino acid residue of the sequence
  MISC_FEATURE (15)..(15): Xaa is glycine, alanine, serine, or an amino acid residue which is covalently linked to another amino acid residue of the sequence
  MISC_FEATURE (16)..(16): Xaa is alanine, valine, glycine, serine, or an amino acid residue which is covalently linked to another amino acid residue of the sequence
  MISC_FEATURE (17)..(17): Xaa is isoleucine, leucine, valine, phenylalanine, methionine, or an amino acid residue which is covalently linked to another amino acid residue of the sequence
QKLVFXAEDXXXXXXXX

SEQ ID NO: 956 - protein, 16 aa, Artificial Sequence
  synthetic
  MISC_FEATURE (5)..(5): Xaa is phenylalanine, tyrosine, valine, leucine, isoleucine, methionine, or an amino acid residue which is covalently linked to another amino acid residue of the sequence
  MISC_FEATURE (9)..(9): Xaa is valine, leucine, isoleucine, alanine, methionine, or an amino acid residue which is covalently linked to another amino acid residue of the sequence
  MISC_FEATURE (10)..(10): Xaa is glycine, alanine, serine, or an amino acid residue which is covalently linked to another amino acid residue of the sequence
  MISC_FEATURE (11)..(11): Xaa is serine, glycine, alanine, threonine, or an amino acid residue which is covalently linked to another amino acid residue of the sequence
  MISC_FEATURE (12)..(12): Xaa is asparagine, glutamine, methionine, or an amino acid residue which is covalently linked to another amino acid residue of the sequence
  MISC_FEATURE (13)..(13): Xaa is lysine, arginine, or an amino acid residue which is covalently linked to another amino acid residue of the sequence
  MISC_FEATURE (14)..(14): Xaa is glycine, alanine, serine, or an amino acid residue which is covalently linked to another amino acid residue of the sequence
  MISC_FEATURE (15)..(15): Xaa is alanine, valine, glycine, serine, or an amino acid residue which is covalently linked to another amino acid residue of the sequence
  MISC_FEATURE (16)..(16): Xaa is isoleucine, leucine, valine, phenylalanine, methionine, or an amino acid residue which is covalently linked to another amino acid residue of the sequence
KLVFXAEDXXXXXXXX

SEQ ID NO: 957 - protein, 15 aa, Artificial Sequence
  synthetic
  MISC_FEATURE (4)..(4): Xaa is phenylalanine, tyrosine, valine, leucine, isoleucine, methionine, or an amino acid residue which is covalently linked to another amino acid residue of the sequence
  MISC_FEATURE (8)..(8): Xaa is valine, leucine, isoleucine, alanine, methionine, or an amino acid residue which is covalently linked to another amino acid residue of the sequence
  MISC_FEATURE (9)..(9): Xaa is glycine, alanine, serine, or an amino acid residue which is covalently linked to another amino acid residue of the sequence
  MISC_FEATURE (10)..(10): Xaa is serine, glycine, alanine, threonine, or an amino acid residue which is covalently linked to another amino acid residue of the sequence
  MISC_FEATURE (11)..(11): Xaa is asparagine, glutamine, methionine, or an amino acid residue which is covalently linked to another amino acid residue of the sequence
  MISC_FEATURE (12)..(12): Xaa is lysine, arginine, or an amino acid residue which is covalently linked to another amino acid residue of the sequence
  MISC_FEATURE (13)..(13): Xaa is glycine, alanine, serine, or an amino acid residue which is covalently linked to another amino acid residue of the sequence
  MISC_FEATURE (14)..(14): Xaa is alanine, valine, glycine, serine, or an amino acid residue which is covalently linked to another amino acid residue of the sequence
  MISC_FEATURE (15)..(15): Xaa is isoleucine, leucine, valine, phenylalanine, methionine, or an amino acid residue which is covalently linked to another amino acid residue of the sequence
LVFXAEDXXXXXXXX

SEQ ID NO: 958 - protein, 14 aa, Artificial Sequence
  synthetic
  MISC_FEATURE (3)..(3): Xaa is phenylalanine, tyrosine, valine, leucine, isoleucine, methionine, or an amino acid residue which is covalently linked to another amino acid residue of the sequence
  MISC_FEATURE (7)..(7): Xaa is valine, leucine, isoleucine, alanine, methionine, or an amino acid residue which is covalently linked to another amino acid residue of the sequence
  MISC_FEATURE (8)..(8): Xaa is glycine, alanine, serine, or an amino acid residue which is covalently linked to another amino acid residue of the sequence
  MISC_FEATURE (9)..(9): Xaa is serine, glycine, alanine, threonine, or an amino acid residue which is covalently linked to another amino acid residue of the sequence
  MISC_FEATURE (10)..(10): Xaa is asparagine, glutamine, methionine, or an amino acid residue which is covalently linked to another amino acid residue of the sequence
  MISC_FEATURE (11)..(11): Xaa is lysine, arginine, or an amino acid residue which is covalently linked to another amino acid residue of the sequence
  MISC_FEATURE (12)..(12): Xaa is glycine, alanine, serine, or an amino acid residue which is covalently linked to another amino acid residue of the sequence
  MISC_FEATURE (13)..(13): Xaa is alanine, valine, glycine, serine, or an amino acid residue which is covalently linked to another amino acid residue of the sequence
  MISC_FEATURE (14)..(14): Xaa is isoleucine, leucine, valine, phenylalanine, methionine, or an amino acid residue which is covalently linked to another amino acid residue of the sequence
VFXAEDXXXXXXXX

SEQ ID NO: 959 - protein, 13 aa, Artificial Sequence
  synthetic
  MISC_FEATURE (2)..(2): Xaa is phenylalanine, tyrosine, valine, leucine, isoleucine, methionine, or an amino acid residue which is covalently linked to another amino acid residue of the sequence
  MISC_FEATURE (6)..(6): Xaa is valine, leucine, isoleucine, alanine, methionine, or an amino acid residue which is covalently linked to another amino acid residue of the sequence
  MISC_FEATURE (7)..(7): Xaa is glycine, alanine, serine, or an amino acid residue which is covalently linked to another amino acid residue of the sequence
  MISC_FEATURE (8)..(8): Xaa is serine, glycine, alanine, threonine, or an amino acid residue which is covalently linked to another amino acid residue of the sequence
  MISC_FEATURE (9)..(9): Xaa is asparagine, glutamine, methionine, or an amino acid residue which is covalently linked to another amino acid residue of the sequence
  MISC_FEATURE (10)..(10): Xaa is lysine, arginine, or an amino acid residue which is covalently linked to another amino acid residue of the sequence
  MISC_FEATURE (11)..(11): Xaa is glycine, alanine, serine, or an amino acid residue which is covalently linked to another amino acid residue of the sequence
  MISC_FEATURE (12)..(12): Xaa is alanine, valine, glycine, serine, or an amino acid residue which is covalently linked to another amino acid residue of the sequence
  MISC_FEATURE (13)..(13): Xaa is isoleucine, leucine, valine, phenylalanine, methionine, or an amino acid residue which is covalently linked to another amino acid residue of the sequence
FXAEDXXXXXXXX

SEQ ID NO: 960 - protein, 12 aa, Artificial Sequence
  synthetic
  MISC_FEATURE (1)..(1): Xaa is phenylalanine, tyrosine, valine, leucine, isoleucine, methionine, or an amino acid residue which is covalently linked to another amino acid residue of the sequence
  MISC_FEATURE (5)..(5): Xaa is valine, leucine, isoleucine, alanine, methionine, or an amino acid residue which is covalently linked to another amino acid residue of the sequence
  MISC_FEATURE (6)..(6): Xaa is glycine, alanine, serine, or an amino acid residue which is covalently linked to another amino acid residue of the sequence
  MISC_FEATURE (7)..(7): Xaa is serine, glycine, alanine, threonine, or an amino acid residue which is covalently linked to another amino acid residue of the sequence
  MISC_FEATURE (8)..(8): Xaa is asparagine, glutamine, methionine, or an amino acid residue which is covalently linked to another amino acid residue of the sequence
  MISC_FEATURE (9)..(9): Xaa is lysine, arginine, or an amino acid residue which is covalently linked to another amino acid residue of the sequence
  MISC_FEATURE (10)..(10): Xaa is glycine, alanine, serine, or an amino acid residue which is covalently linked to another amino acid residue of the sequence
  MISC_FEATURE (11)..(11): Xaa is alanine, valine, glycine, serine, or an amino acid residue which is covalently linked to another amino acid residue of the sequence
  MISC_FEATURE (12)..(12): Xaa is isoleucine, leucine, valine, phenylalanine, methionine, or an amino acid residue which is covalently linked to another amino acid residue of the sequence
XAEDXXXXXXXX

We claim:

1. An amyloid β peptide analogue comprising an amino acid sequence, wherein the sequence (i) forms a loop, (ii) has at least 66% identity to native human Aβ peptide or a portion thereof, (iii) comprises at least 6 contiguous amino acid residues and (iv) has at least 2 non-contiguous amino acid residues which are covalently linked with each other; or a derivative thereof.

2. The amyloid β peptide analogue of claim 1, wherein the amino acid sequence is a peptidomimetic.

3. The amyloid β peptide analogue of claim 1, wherein the loop is a β-hairpin loop.

4. The amyloid β peptide analogue of claim 1, wherein native Aβ human peptide or the portion thereof is Aβ(X . . . Y), X being selected from the group consisting of the numbers 1 . . . 23, 15 . . . 23, or 18 . . . 22 and Y being selected from the group consisting of the numbers 28 . . . 43, or 28 . . . 43.

5. The amyloid β peptide analogue of claim 1, wherein the 6 contiguous amino acid residues comprise the sequence VGSN or DVGSNK or AED.

6. The amyloid β peptide analogue of claim 1, wherein the amino acid sequence comprises the sequence F₁₉X₂₀A₂₁-Q-A₃₀I₃₁I₃₂, with X₂₀ representing an amino acid and Q being an amino acid sequence comprising the sequence VGSN.

7. The amyloid β peptide analogue of claim 6, wherein at least part of the amino acid sequence Q forms the loop and the amino acid sequences F₁₉X₂₀A₂₁ and A₃₀I₃₁I₃₂ are in anti-parallel orientation.

8. The amyloid β peptide analogue of claim 1, wherein the amino acid sequence comprises a sequence selected from the group consisting of SEQ ID NO:1-368, at least two amino acid residues of said sequence being modified so as to form an intra-sequence covalent linkage.

9. The amyloid β peptide analogue of claim 1, wherein the amino acid sequence of the amyloid β peptide analogue is a sequence selected from the group consisting of SEQ ID NO:369-698, wherein
X₁₂ is valine, leucine, isoleucine, alanine, methionine, or an amino acid residue which is covalently linked to another amino acid residue of the sequence;
X₁₃ is histidine, tyrosine, serine, methionine, or an amino acid residue which is covalently linked to another amino acid residue of the sequence;
X₁₄ is histidine, tyrosine, serine, methionine, or an amino acid residue which is covalently linked to another amino acid residue of the sequence;
X₁₅ is glutamine, asparagine, methionine, serine, or an amino acid which is covalently linked to another amino acid residue of the sequence;
X₁₆ is lysine, arginine, or an amino acid residue which is covalently linked to another amino acid residue of the sequence;
X₁₇ is leucine, isoleucine, valine, phenylalanine, methionine, or an amino acid residue which is covalently linked to another amino acid residue of the sequence;
X₁₈ is valine, leucine, isoleucine, alanine, methionine, or an amino acid residue which is covalently linked to another amino acid residue of the sequence;
X₁₉ is phenylalanine, tyrosine, valine, leucine, isoleucine, methionine, or an amino acid residue which is covalently linked to another amino acid residue of the sequence;
X₂₀ is phenylalanine, tyrosine, valine, leucine, isoleucine, methionine, or an amino acid residue which is covalently linked to another amino acid residue of the sequence;
X₂₁ is alanine, valine, glycine, serine, or an amino acid residue which is covalently linked to another amino acid residue of the sequence;
X₂₂ is glutamic acid, aspartic acid, or an amino acid residue which is covalently linked to another amino acid residue of the sequence;
X₂₉ is glycine, alanine, serine, or an amino acid residue which is covalently linked to another amino acid residue of the sequence;
X₃₀ is alanine, valine, glycine, serine, or an amino acid residue which is covalently linked to another amino acid residue of the sequence;
X₃₁ is isoleucine, leucine, valine, phenylalanine, methionine, or an amino acid residue which is covalently linked to another amino acid residue of the sequence;
X₃₂ is isoleucine, leucine, valine, phenylalanine, methionine, or an amino acid residue which is covalently linked to another amino acid residue of the sequence;
X₃₃ is glycine, alanine, serine, or an amino acid residue which is covalently linked to another amino acid residue of the sequence;
X₃₄ is leucine, isoleucine, valine, phenylalanine, methionine, or an amino acid residue which is covalently linked to another amino acid residue of the sequence;
X₃₅ is methionine, valine, leucine, isoleucine, alanine, or an amino acid residue which is covalently linked to another amino acid residue of the sequence;
X₃₆ is valine, leucine, isoleucine, alanine, methionine, or an amino acid residue which is covalently linked to another amino acid residue of the sequence;
X₃₇ is glycine, alanine, serine, or an amino acid residue which is covalently linked to another amino acid residue of the sequence;
X₃₈ is glycine, alanine, serine, or an amino acid residue which is covalently linked to another amino acid residue of the sequence; and
X₃₉ is valine, leucine, isoleucine, alanine, methionine, or an amino acid residue which is covalently linked to another amino acid residue of the sequence,
at least one amino acid residue selected from the group consisting of X₁₂, X₁₃, X₁₄, X₁₅, X₁₆, X₁₇, X₁₈, X₁₉, X₂₀, X₂₁ and X₂₂ and at least one amino acid residue selected from the group consisting of X₂₉, X₃₀, X₃₁, X₃₂, X₃₃, X₃₄, X₃₅, X₃₆, X₃₇, X₃₈, X₃₉ being covalently linked with each other.

10. The amyloid β peptide analogue of claim 1, wherein the amino acid sequence of the amyloid β peptide analogue comprises the sequence X₂₀-Q-X₂₄X₂₅X₂₆X₂₇X₂₈X₂₉A₃₀I₃₁, with each of X₂₀, X₂₄ X₂₅, X₂₆, X₂₇, X₂₈, X₂₉ independently representing an amino acid and Q being an amino acid sequence comprising the sequence AED.

11. The amyloid β peptide analogue of claim 10, wherein at least part of the amino acid sequence X₂₄X₂₅X₂₆X₂₇ forms the loop and the amino acid sequences X₂₀A₂₁E₂₂D₂₃ and X₂₈X₂₉A₃₀I₃₁ are in anti-parallel orientation.

12. The amyloid β peptide analogue of claim 1, wherein the amino acid sequence of the amyloid β peptide analogue is a sequence selected from the group consisting of SEQ ID NO:699-960, wherein
X₁₂ is valine, leucine, isoleucine, alanine, methionine, or an amino acid residue which is covalently linked to another amino acid residue of the sequence;
X₁₃ is histidine, tyrosine, serine, methionine, or an amino acid residue which is covalently linked to another amino acid residue of the sequence;
X₁₄ is histidine, tyrosine, serine, methionine, or an amino acid residue which is covalently linked to another amino acid residue of the sequence;
X₁₅ is glutamine, asparagine, methionine, serine, or an amino acid which is covalently linked to another amino acid residue of the sequence;
X₁₆ is lysine, arginine, or an amino acid residue which is covalently linked to another amino acid residue of the sequence;
X₁₇ is leucine, isoleucine, valine, phenylalanine, methionine, or an amino acid residue which is covalently linked to another amino acid residue of the sequence;
X₁₈ is valine, leucine, isoleucine, alanine, methionine, or an amino acid residue which is covalently linked to another amino acid residue of the sequence;
X₁₉ is phenylalanine, tyrosine, valine, leucine, isoleucine, methionine, or an amino acid residue which is covalently linked to another amino acid residue of the sequence;
X₂₀ is phenylalanine, tyrosine, valine, leucine, isoleucine, methionine, or an amino acid residue which is covalently linked to another amino acid residue of the sequence;
X₂₄ is valine, leucine, isoleucine, alanine, methionine, or an amino acid residue which is covalently linked to another amino acid residue of the sequence;
X₂₅ is glycine, alanine, serine, or an amino acid residue which is covalently linked to another amino acid residue of the sequence;
X₂₆ is serine, glycine, alanine, threonine, or an amino acid residue which is covalently linked to another amino acid residue of the sequence;
X₂₇ is asparagine, glutamine, methionine, or an amino acid residue which is covalently linked to another amino acid residue of the sequence;
X₂₈ is lysine, arginine, or an amino acid residue which is covalently linked to another amino acid residue of the sequence;
X₂₉ is glycine, alanine, serine, or an amino acid residue which is covalently linked to another amino acid residue of the sequence;
X₃₀ is alanine, valine, glycine, serine, or an amino acid residue which is covalently linked to another amino acid residue of the sequence;
X₃₁ is isoleucine, leucine, valine, phenylalanine, methionine, or an amino acid residue which is covalently linked to another amino acid residue of the sequence;
X₃₂ is isoleucine, leucine, valine, phenylalanine, methionine, or an amino acid residue which is covalently linked to another amino acid residue of the sequence;
X₃₃ is glycine, alanine, serine, or an amino acid residue which is covalently linked to another amino acid residue of the sequence;
X₃₄ is leucine, isoleucine, valine, phenylalanine, methionine, or an amino acid residue which is covalently linked to another amino acid residue of the sequence;
X₃₅ is methionine, valine, leucine, isoleucine, alanine, or an amino acid residue which is covalently linked to another amino acid residue of the sequence;
X₃₆ is valine, leucine, isoleucine, alanine, methionine, or an amino acid residue which is covalently linked to another amino acid residue of the sequence;
X₃₇ is glycine, alanine, serine, or an amino acid residue which is covalently linked to another amino acid residue of the sequence;
X₃₈ is glycine, alanine, serine, or an amino acid residue which is covalently linked to another amino acid residue of the sequence; and
X₃₉ is valine, leucine, isoleucine, alanine, methionine, or an amino acid residue which is covalently linked to another amino acid residue of the sequence,
at least one amino acid residue selected from the group consisting of X₁₂, X₁₃, X₁₄, X₁₅, X₁₆, X₁₇, X₁₈, X₁₉, X₂₀, and at least one amino acid residue selected from the group consisting of X₂₉, X₃₀, X₃₁, X₃₂, X₃₃, X₃₄, X₃₅, X₃₆, X₃₇, X₃₈, X₃₉ being covalently linked with each other.

13. The derivative of claim 1 wherein the derivative is an oligomer comprising a plurality of amyloid β peptide analogues.

14. A process for preparing the amyloid β peptide analogue of claim 1, which process comprises
(i) providing a peptide or peptidomimetic thereof;
(ii) subjecting the peptide or peptidomimetic to conditions sufficient for the formation of the linkage.

15. A process for preparing the oligomer of claim 13, which process comprises
(i) providing a peptide or peptidomimetic thereof;
(ii) subjecting the peptide or peptidomimetic to conditions sufficient for the formation of the oligomer and the linkage.

16. A composition comprising the amyloid β peptide analogue as in claim 1 and optionally a pharmaceutical acceptable carrier.

17. Use of an amyloid β peptide analogue or derivative as in claim 1 for preparing a pharmaceutical composition for active immunization in treating or preventing amyloidosis.

18. Use of an amyloid β peptide analogue or derivative as in claim 1 for preparing a composition for diagnosing amyloidosis.

19. A method of identifying an agent capable of binding to an amyloid β peptide analogue or derivative as in claim 1, which method comprises the steps of: a) exposing one or more agents of interest to the amyloid β peptide analogue or derivative for a time and under conditions sufficient for the one or more agents to bind to the amyloid β peptide analogue or derivative; and b) identifying those agents which bind to the amyloid β peptide analogue or derivative.

20. A method of providing an antibody capable of binding to an amyloid β peptide analogue or derivative as in claim 1, which comprises
i) providing an antigen comprising the amyloid β peptide analogue or derivative;
ii) exposing an antibody repertoire to said antigen; and
iii) selecting from said repertoire an antibody which binds to the amyloid β peptide analogue or derivative.
